United States Patent Application Publication US 2026/0058010 A1 - sequence listing, part 51

SEQ ID NO: 569 - DNA, 427830 bp, Homo sapiens
  source 1..427830: mol_type = genomic DNA
ctacaaataaaaagtaatacaatattttttaccaattcacccaagaagcatattttgtaacagccactgtgccacgtataaaaagacctggtttttgctattcaagagcttgtcctctggttaaactgagtgctaagaagtgctggcagactgccgtgaaggtgaaacaggaatacagagaatagagaaatggggaagggcgtctgtgttcgaaacccaggtctgctcaggggtcaagcaagtcggagtcagaaaaagtaaagtgtttaacatcgagttttcaatatttatttgtttacaatgcgtcacattctgctcctagatagggttaacctctgaagacctcagatttcgctgcttttccttgccgtggagagggaataaaacgggcatcgtggcctccgcgatgggcgctcgtgcctgggtcgaaggactggggggcggaggatttggaaagggagaaaaatacgggctggcttctttttaaaaaatgtgggtagccttgcctgcccccgccgcactggaatttatcctaaacttactttcatttacattaaaacaagacgatttgagtctaccaaacccaatactgcatctgtgaggctccttttggcacaaacctgaatgaacagcgggaaacgccgtctcccctggcgtctgagatctggggtcccctccccacctggtctcctcgctcccgccccagccccgtgcgccccaggagggcaccgccgagcgccgggtccccgcagggttcgggagactccgcggaccggaggagggataggacccccgagctttgggggcgggaagggagggtggaaggaggaggggagcggggttggggaaagttggagcttcggtatcttttctccgggccaggccgtcctcggggccctgcgctgcgtctccaagtgctgggaagactccgcggggaaaggtctgaggacgcggccggctggcacaggtgtggcggcttcagagggccggggagaacccatggcttcgaggctgtggactagaaatgtccctgattagaagctgagaacctttggccagggaggtggggcggcggggaggggtcgtcaagccggtccagagcgcgcccacctgcgccacaagggagaagaggtgccccccgcccccctccgcccaccgccgccacgatgcgccgcggacctcggcgacccagcccgggtagaagcgcgcgctcccctcctccagcctcgtgcgccggcccctgccccgccagccccgctatggtcccccatccacccccgcgggagcgcccctgtccccccatcctgcacttcccccagagtcgcgcgccagtttcccgccccgtggaagcgcccctctcccgacttcggctgatccccgctcgccgccctccccgcgggtgcgcgcccggcccctccctcgcccggggcgggtctgcgtgggcggtgctccgggtcggcgggcggagctccggttccccagccctgcgccccggtggagcccgagccggagccggcagaggggcgcgggcgcggacgcggcgcctggcggggccctgggaggctcggacggggtcctggcgttgagctcggccggcccggagcgcggacccagccgcaggggcggcgatgggcaccgagggacccccgcccccggccgcctcccgcggacgccagggctgcctgctggtacctgcgcgggtgagtgcggcccctcagcgccccttcacctccggccccccttccctctccttcgcgcccttctccccccgcccctcctccctccacgccccctcgctccccgcgaccccttccctgtctccggggacggctggccggagggtgggcgccggagccccgggacgcagtgggcacccgccccctggccgctctgctccctccagcccagtgtcttactggaaacttgcaggctttgctcctccagcgtcttctaaggtttggttttgaggcgcccgggcttccctttactgcgtgggaagtagtgctttccagaatttgggatttgagattggcccggcattgcttcccaggagcggctctttcgggcccaggcggtggctcggaccggagcgtcccccctgcagccttcgggcgcccaggccaggtctgagttggccagtttgagcccagccaggtgcatggcgcggcctcggcaggtgctgggggctctaggccattcggggaaccgctgggacgccaactgggtaatacggatttcttttttgaagtctattctggttcccaccctaaataactccctcttcaccttcttatttttaaataactaaactattgattgacagaaaacagaaatgttggcccaaagaaaaacgaaaagttcttggaaaccttcaagttgccacccacagcacagcctcgagttgtgaaaacagtttaagggagcacgtggccaccccagccctaggaggctgccgagaagcgcggctgttaatgaaaatgcattgacaaccactcctttaggattccttccccaggagctcccagtcccaggagcgaccaggaatacagttagccctcccttataggacagtggagagacggttcagaaggccacgggttgagggctgctacaaattcctatcgtcataataatgattctaaactaggactgtggtcgtcgctactgtgatgttaaaaagatttctatgtagagacaggtgcatcttcattcaagtagcacctttctgggcttttactacaaaatatgaaaattaaatttcatgtaaaatgtgggtgttcgtttcttgaagtactttgtaatatgaatagctatcccactgttgcccatggtaatcaaacccgagaaaatatgcggggattacctggaaataaaccgcagtaaaaactgcaggcgctgtggaatcacaggctttccgtctggtcactgccttcagctttataatgatgccctcccacggttagggattgtgcatttttctccagacattcgagcaaagcaattcttgcttttaatcattgtaattatagcggaagcgttgaagtggattcatcatacttcatgattgacccacttgatgagttattggcaataacgtcaacaaataaagcaactgcgcgtattctagtaaatgctctcctttgcgctcagtattaattaaggtgctaaatttgatgttttccagtcaagagtggcctctgctcacctgtttgctacaagatgtgattggcgctttctttctaataaggaccttgattatttgaaacagcctgtctgaattgtattgaaagaaactttttttttagcgttggaggccaagtattacaataagatggagcattttaagagcaagactcctaactttgcagtcataagtaattaggtatgtgctaagcctaccttagacaccagtgcatggtcatgttagctcagattcttatgtatttaaaacgaatctgttaagtattggtgttggcaggtttgtcttgaaaacatgaatgttcttagtatacaatgtcatccttacttaatggcagaattattttcttaccataactgcacaatattattcaacttgtgtaattatttaatcatttcagttaagagaacttggtgcttttaactagaaaaagatgaaagtcttttctaaatcttatatttctagttatattttttctatctgaagtcaaaactatacacattctttatcatgactgcttgtttgaatcatggaatttggccacgtttgaaggtctcctgttcggtaacagacctgttttgtttcccctttcaagtgcctgttcccgatgtttttttctaagttaagtgagttcatggagctctgtctctgaccatacctggatttgaggggtaaaatcccactggcagacaacctcagtacaatgtgcgaagtgtgtcttgcttgtagcttcaaagactactattggttgatgtttacagcacatttgctgcttttaaatgacaacacttcttcagtctggggcgctggaagaattattggcatgagccgggaacatgcccatttatgtgatgagcttgcccactgaagggggaaagcacgttaggtcattttaaaggtgcatgtggggtaagggcaccacctaatcatctgtttacagatgtgaattgctgcatgagatgaatgaagcatctgagctcctaagaaggttccccattccttctatgctttggttatgtttctcatccttgctgactcatctttaatttcaactgtagaatttctattgacgtctatgacatcataagcaaaatccatgcattacaaagcaggcagttacctgactttaccaggagacatggagacatgttccccagtaaatatttgaatgaggtccaattaagaaaagtgtgccttgtttttgtttttgtttttttccaacatgggatgttaaaattgccttgttttctgaatggtgtatgtggagcaacagcttcttgtctctggatatctttatggatgatgactgtagacaaggcatttaagcttcagttttaatttagatctgcttctcaagataccccatgaggctctgagtgagttggcagaggggctggcattgcagttctcggtgacagagggtgtgtttgcatcgcaggcctcctatttactaaatgggtatattcaggatagacttactaagcagtgtgattttctggctttcctgttagctcatgtagcatgtgacagcaggcacacgagggaccccaaagaggagctgctctcaggctctgctgcgcacccctagctcctgcgctgctgggcatggggcggacacaggcaggtgctcgtggaaatggagaaggaaggagggagatcagggttccagggaactcagagaaccccggcttcgggaaccaccatcctctctggctctggcttctcacctgtggaatgtgtgcttgggttccgaaggtcactttgtatctgattccaaatccctcagaaactcactctttaattagttctagaggtatttttgttgagtgagacacaacaaggaaggtggaaaacatgcttttggaggaaaaatgcactcaggatttaatggaaaatggaccttgaactggtgtgtacttgtcattgttgtccagctggttaccgcatgttgtcatgactgtagttttgaatagtcgactttggattattttcagctaacactagatgtcactttcccccagtccatactaaagttccctgtaaaattcaggaagccgaggttatccttcctatttctgtattaaatgctaagctcccctatgtgggtgtaatccctcacctgaggactgaccccagcctgtggctcttcatcccctgcccctctgaacaagaaggccctccaaaagctcacccatttctggctgccttccagggaccgtgctgcttcttcaccccatcagcctgaaccttcctgttttctccccttgcacattttaataaatactgttaacaatgctgtgaatatgaggatgtgattttgcaattagaattacatgttaaaatagtttgctttttaaggagtctacatttttacatcctataaatatgattataaactagctacattttaatttagcaaagactttggatttaagaaagtgagtatgcttcttatttaggggatactgttctaaacatttgtaaaatgtaaagttatatttttagtgcaaaaactattaaacttcacagtctgctaactgctaaactgctaagttttaattctgttttatctgttatactttgtaaagaaactgcatgtcattcacttctctggacttgaaacctagatcagtgcatggcctgttattttgcaataatccgcattagtgttaatgaaaaaggtgaccctccactgtcaagattctgagtatcaactctgggagttaccaacattcactcgacatttgggtgaacatcatttgatgatggcaccgaatcgtgttattataaaaacaatcacatagaacattagaatcaagtgtcctaaatatcgtgcttattggcctccattttataaatttacttttcctcttgtttttatttggaccccagctccagaagacaaactttcttcttgtactcagccagtggcagtggtctctaagtatggactgaccaggaaatcactgtaattactcctaccttcatcaaaatagtttaaatgacaaatcctgtgcaagaattaaattccacttctgtaaacaatgcttatagttgcagatgttttattgtgtagttcataaattattataggtaagggcacagccatggggacgcactcagattccatggaagaatgtttctgttcgttgagcgggtgtttagaaaataatctgcatttttgaagtgggatacagctgccagttgttctgaacaaaatcatcacttattttggatttggcagcaagtcctctagcaagtcctctcactccgaacagggaggcctcccgtagtctggggtcccagctaccctccttttagaagctggtgccagggaggccaaggggcccacatctgccactgtctccggccctgcctcagagccttccctgcccctgcccctgcccctgcatctgcatctgcatctgccctggccccacccactgcccttgtgactgtgctggcccctgcccctgcccctgcccctgcccctacccctgaccctgacttgtgccaaatgctccgcacctgcccctacccctgccctgcccctgcccatgccctgcacccaccgcgccccgcccctgcccctgccctgcacctacccctgccctgcacctacccctgccctgccactgcccctgcccctgccccgcccctgccccacccctgccccgccccgcccctgcgcctccccctgccctgcccctgcacctccccctgcgcctgcccctgctgggcattctgcgcggacctttccaaaactcctctctgcagctcagtccggagcagggttgtgttctgcccttcccaggctggagcataaccactcaccccgtggctgcatccttcctccctcgggccttcacacaccttggttgggcacgtggagcgctgcctgccctggcccagggcctttgctcagctgcctctcctggaggctgcatctcaccaggcgcagcacctgcccccgcaacccatgccccttcctgcggaggacccgctcccccagggccccggcccacccgtggctgtgaatgggcccatctcggtcgggcgtctaggagggaagtggcacctgggtcccctgctgctgtgagcccgtggaggggccgctttcagaaggacacagcccggggaactcggttctgccctgctgcgtggtagctgacccatgtgtcagttgagccaataagtatatatctgaattagatgtatgtgtttctatgaactagagagaaagttccgtttctggtttttgaactgataatttattttgtatttatgcccagtttatttggatttaagtaaaattgtgctttcatatttttagaatagctatgttttgattttaatttttcacatcagcataagtttaatggtaaatataattctatttctcagctgtatcctgctcaagattatccttcatgacttctctgcagataattatattttaccaaatggctctgtcagtttgcctttttacatgattaagttttctttatgtactgagaaatatgaaattacttcttatacctaaacctggggacatccagaacccgatgagttagatgcagtgtttttagaaacgtgtgccaacttggtcatagttagcataggtcatatggtcttgaaagaaatccaagtctggttttattcctaaaacgatcatggtctgcagcaaggtagatagagaaagtccagcctttgtattacctcctcagaaacactagaaattttaccacctccctgcttgagggggagcaacggatggggaacggtggtgggaagtagctctgggtctcaggcctccttttgaaagttgggggtttggcgatgattaagtgccatttggagaattgctttatcatgatgcaccttacgtacgtgcagacacagacacacagaatttagagaagaatgattgagtacctattaattgccacacactgagctggaagctaaagataaaaatagagtagaacacctctcagaccaggccagtggggccctgactacctgagaggcaaattctagacaagcagacacgaaacagcacagggcagctacaatgtgttccctcttctatagatgaggtcgggcaacatttgtcttccggcacatggaaggcgagactggtactgagactgagactgagactgagacgggagagatgcagtcacaggccaggggcacctgcagccaccagagctagaggaggcaggaaggaggctccctggagcctctggaggaatttgatcctggacttctggcttccagaactgtgagaagataaatgtgcattgttttaagccactaagtttgaggaagtgttgtcatagcagccgtgggaagctaatcagtctttttaggtaagtaatatagcttttagggaatatcttcttagaaatgtagggaatttgagcccagaacccccaggttagaacttacctaattgctaacatctactaggtactaagagctctttggagggcttcgttcctttaacacccctggggtactgctgatgctccccacctacacataagactgtagagacggcaggtgaggtgtggtccgcatggtggctgcagcccctgggcgtctgactgtgagagagatgtctctatcccacgtgcaaaggctgagaaatggccccaaatgcgtttcctttaagtggttattgcttgtgagacaaaaggataacaacaggaattaggaaatcagaatcaggaggaatatacaactgttttcttataactgaggttgtcatacaaaatgggaacaggttcataagtcgagtagatggcaacagctcatgcagcccctccccacacacatagcagtgaaatgatgttgagatcatgcagagtactatgtgatattctccagatttggtgcttcaagatggatttttcataaaaagactctgcaaagatatgacattttattgaagctgaactagcagaagctttgtcaattacctacactgtaattgctttaaaaaggaaaaaaaagaaaacctctaaagtcaccattatctaaattggggttaagaatttgaaaggtattgagaacatgaatttgtaaccaaaatacattataatctaaataaatggtctttttttttaaagtggttcatttgaaatccagagagatatgaaaaaaattgtgtggacttccaaattattttctattttagctttctagatgtagtacagtaaaatgtactatttcttacatagtttaatattttgatgttaggagttatagtatcaaacatgccttatgacagtcaaaattttgggatagtacgatatctaaaacaatgatgcttgggtaagagttaagaaattagaaccaaactctgaaactgctaataacaaaaggtaataaaggataaggactcacacacagataagaccactttttctctgtatataaaatacatttgttctttgtagcaacaaaatgaaatagaacaaattgtaatatattttgtaatgtataacacttatataaggtttaattatatttaaaaaattcatttctatgttgaataatattgtaaatttagtaatcgaataaagaggaaaatctagtagctgaaaaaaggaagtaaactgaaagctttcctatcagaacaagatacaaacccactaggaaacagctgcatatgtgaattacgtgctttgtaagcgctgggatgtaaatattcttttatgcaactcttccttattgaattgaggagaggaccagcacagatctatgaaaatgctatgagctttatgtattgcaattattttcttccaaagctttatcaaattttgtcgtgacctacagattcttttggttttaatcagggtggaatcagaatgcttttagatttgtaatttccatgttggcaggaggaagggagtcagggaggcctggagtcggggggaggtccagggttcagctgtgctagggtcgcctggtgcagggggctgcctgggggtgtggtgttcccgcagtgggctgtgcaaagtctcagggcggcctttgctttactggccttgggctgaatggagaaggtgaacggagcagaccagtgtcacagaattgcatcgtgcaggccttgcctttgtgacccggggctggaggctgcatctcgggtgccgctgtgcagatggagggaacctttggggatgtgatttgaatcttcctatccccttctttggagtaaatacatttcctttattcctttgatgtttgtatgaatagtggcatggtatccgtatctcagtactgaaagtgaatatgagatggaaaaatacaaggaaggaaagttcctgtgacctggtctatacctatctagcagctcatagatttccttctggctttttctggtgtatattctgtaagttaaactcatcctcaagatagaattttctatcctgctttttagaattctcattataaaatgataattttcatagtttgctaagaaatatccatcaattaccatcatccccctgcttaaggttcttctgtatcagtggagaggcttcgggcaggtgttcccgtaggagggggctctgttaatgacacggtcctttgcccttctgtctggaaagcagcacctgtccttgctgcactggctcaggcgtctgtgactagggtgacagtgttgcttaggaatcccagctgatagccaggcctgttccctggtaggatcccacagtggggaatgctgggcttctgggccccacagttctcccgagagctcgggctgcctgttctcctttgttctctcctttgttgggaatgcttcagtgcacgatgcttttcagggtagggtcatgtgtgccttattttctcatcggtgagattggattcctgttgtctcccaggtgagccctggaactcagggttcagctggatgcagacagaggactctgccctcgtggaggagctgggagcacggtgagctctgagggttccggggcacggctataggttctgaagggggtgctcctactgcctgctcatgggagcacggtgagctctgagggttcccgggcatggctgtaggttctgaagggggtgctcctactgcctgctcatgggagcatggtgagctctgagggttcctaggttctgaagggggtgctcctactgcctgctcatgggagcacggtgagctctgagggttcccacgcacggctgtaggttctgaagggggtgctcctaatgcctgttcatgggagcacggtgagctctgagggttcccgggcatggctgttggttctgaagggggtgctcctactgcctgctcatggtcttgggactcctcacctgccctcctgctccctgccactccagggcacagcccctggtttgtctgttcctgtcactccccgcctggacgggcagctcccatgaatgctgccagctactgtagatagtgctgatcacaataatttatgatttctgattttatcaccattttctgttgatataaatctttatcttactgatattgccagagtttctagtaaatgagaaattgtcatggtaaataaaaccaactttattttgttttatatgttatcacccctgggaggcttttggtttgaaactactgttagattttattttatttttttatttttgagacggtgtcttgctctgttacccaggctggagtgcagtggcacgatcttggctcactgcaacctctgcctctgggattcaagcgatttctggctttttaatatatttttagtagagatggggtttcacaatgttggccaggctcccaaagtgctaggattacaggagtgagccactgtgcccgtggagatgaaccatgtctgtgaacttttctataacgtagcatctgcattagtacagctgctgggagttaacacaccacggtgtgcccaggaaatgttacattttaattttcttactcagaatggtaggattagccattgaatttctcaattattgggttttctgcaatatcttttaatggagcattttattctttttcttaatttgtaggcttatgttgtgtctgttgttttgtttcctgggatctcttatgtcattttgagttcagtttttccgctattctgaaatgtgggtacattcccagtgaatgggtctaagatagtgacagcctgtttgtctccgtgctgaactgatcatggcagtggatcttgctcagagaaaggaagtgcttttagctaggctgggtttatagaaaacacactggtatgcacacttcatgtgaagctgctgaggcttttagccaggctgggtttatagaaaacacactggtgtgcacacttcatgtgaagctgctgaggaaaatttactttttagaacagcagtacttcttcccagatgagcagatggaaaaatcacatttcacaatttcagttgagaaagatggagttgtaccattcaatctagacttcattggttcttcagtgaaatgtggaaatactggtaacctaagatacatttcttattttagttttagttttttggctggagtgcagtggcatgatcatagcttactgcagccttgaactccccaaacacctcagctcaagcaatgcccctgccccagcctcccgagtagctggaaccacaggcacatgccactatcccggctaactttttaacttttataccgatggggtcccattatgttgcccaggctgatcttgaactcctggtcttaagcgaccctcctgcctcggcctcccaaagtgctgagattgtaggtgtgagccaccatgcccagccccaagataagtttcgtaccatacaagaaagcatgagttttgtggtgacggttctggatctggatctgccttgcaccttttctttaaccacatcactctcagcttcttcatttgtgtccttcgctgtatccagttgctggagtagctgcatttgaaaccatatgagcctctgcaatgcagaaaaataattagatgaagtaaggaatttatccatggtacaaatagaatcaacatatttcttgattatgcctgtctttgaataagtaggttatgctgagttttcacttcatctttgaaataaatagaaaaataataaatcgaatatgttttattcaacctcatgatgttaagtaatgaagccacataaaaccaagaaaattacagatacctgtgtaaaggagatatggtgagccctgtcctggcttctaatttgattgaggagaggcacataaattgaaaacaaaacaaaaaaacagttcattaaaacagaagataagtgtcatcccttaaattagagaatgagcgtgctaagccccacattcacaggtgcctctactagcggggaatttggaggtactgcaaatatttcaaaccagaaaaggtgaatactgatgatttttggcgtggtaacatgatttctcataccactcctgtagtctaaagctggtttgagtgcctgctttgtgtcatactattcaaaaactaactgcagtttttcttaatttattcttcattaatcatcagactatgatttgagctttttttaaaaaaaaaacttcattatttgaaagtgattaacattaacatcattaacataatgaatttaaagcctatttttccaaaagcatcacaaaataggtacttttgaaaatgaaaatatgctacgtaaaaattgaaatggaatgacccaaaaaattcaaaattgcattaaagtagacagaaaaaatgtgcttcaaacagataagaaaggcagcatgctcaaaaaagttaactctttatttaactttatcatatttatatgatatacagttttctaaacattagttcttctgggaaaagtattaggaaggcgagcaagtcagtttccacgctttacacacttatatgtaaatgaggtgaccagggttatcacctatgtttggtatacgtgtacccaaaataattaataatgttcttattgaaataacatgtgccttgggaccaactcctaatatttacacctttaaagataaaagtatatttaatatgccagtttttaacttcactaaaatttgggcctttcatttttcttttccacagtttttgactggcttgaatagtgcctggcccatactaggtgcccagtaaaaattggctgaagatattaatactaaattaaaatatttcaatttcaaactaactctagaatcttaacagtttacaggacacatctccactcggtactaagtataaatcctttggagggtgtcatgtgaaaatgaagctaacagttaagataatccaattgcatgttgttataaatctgtcttcattttcttctttttgtttcttctttttgtttcttcactttgttccaaagtgaccgtgtctctcatttttaacagtttcagctgcctgcgttttcctgtctctagtctcaaggctcagcgatccacgcagtcacagtgtgtgctgctctccctgttggcgagctttgtaatcagatctgtcttcttggtgatattgaacaccagtgttgcttgtgaaatccaggcgtcagcactacctctggatcttgtaatgaagctccaaggtagccaaagaactcacacatgcctaactttttagaaagagagcaattttctaaaataaattccttattaagaaggagtcttcttatagttgtgtggaaagtttgttggaagcatctttcattgacttgtatactgtgttctaaggacatgagggagcccttcctgtcccatggtgtctccgcctgcctccgccccttcgtgccagggttactgatttgcttcaggtgcctttaggatttttgcaggaaaagagtcaatatttaacattttacttccaggagagcagtcccaaacaaatccttctcatccatattgctgactgtaggatgcagatgtgtttgcaggaaatgtgttagggaggttcccagcatcaccccatgagaaggatgggaggaggaagggctggacaaggggccctgagggatgaggccttggttgatcctacaaggagttctgaagacaggacaagcctttgaaagcctcccctgtggggaagagacactgggtccttggaagtgcagggtcctcgagacacggggagctctggggtgaggctgttcctgagaggctgagccctgggcactctgccacagcgggtcccgccctgtgccaggaagaatctgagcagccttgccgtccactgcgtgtgacactcggttccatgcttggggtaggttctgagaagagctcctcttgggtggggtttctccaccaaggaacttggaagacggggagaatgggtggcagccccctctgtcctgttggccctggggctcctgtgccctggttctggtcctgctccttggcccctcagtccacctccttggccacctttgcttttcctccttggtcccctgtccttttcctgcacccccaatcttcatccttggccctgaatcctccttagtcccccagtcctcctctggactccagttctcctccttggaccccagtcctcctccttggaccccaatcctcctcctggtccccagtcctcctccttggaccccaatcctcctcctggtccccagtcctcctcctggtccccaatcctcctcctggtccccagtcctcctccttggaccccaatcctcctcctggtccccagtcctcctccttggaccccaatcctcctcctggtccccagtcctcctccttggaccccaatcctcctcctggtccccagtcctcctcctggtccccaatcctcctcctggtccccagtcctcctccttggacccttgtttctcctccttgatcccttggcctccttggtctccctgttcctgttggttgcctcctcctccttgacttggtcctcctccttgatcctctggtcttcttcagggtcccctcctcctggcctctcggtcctcctccttgaccccctggtcctcttctgtggtcccctcctcctctgtggccccctcctcctccgttgcccctggtcctcctcgtcctttgggctgccctcggctcgggggctgctgctgctggcgggggtgtcagctgcccagtgtgtgctctcccctggaattccactggatggggtggggggtttccttctgtcttttactccatctgtgttgtccatgcagctgggccccctacagtcttctccagaaggacctgtatgggggtggctgacaggtaacctgctccctgcacatggctctccaccctccatggtgagccaggctggcacctgggcaggagtcaagggccgccttggcctgggctgaccctggacccacagagacccttagggcgggctgggcccagctcctcccggctgctcccggctcctcccagctgctcccactcagtccctgcttctttggtcctgtgtgtcggacccatccctaccatggccttgctgcttctctcgcctccatgcatgcccagggtcccccgcggaacctgcttcacagcgagtcctgccctggcatttgctcttgtggggcctggaccagaacccaccttgtcccacctcccttctctgtgccacattctgtgtggggtcttcagttacttctgggtcatcaaaactggttagttttgatatttttaaaatgtttgttgttgcacttacaataacttcttctgggtatttatatctattaagagtacttattttacatttttttttacttaaaaatttaaatatctgcaatctttgcctgattctgcaatttgttacttttgtctttttttaaccttgagagaaaatgcttattttcttgtgttttggataatttctcattgtgttcatttgaactctgatggtgagaattctttaaggaatatgttcctttcatctttatctgtaagatttttgagatttgtaaaggcttttataatgcataattcataagagaaaaatacttctgactataaggaaatttttcaaaatcatgtaggacaaaacaaaatataaataagttataaaatgaatgcaaaacaatgaaatagaaaagtatttcaaaaacaaataatagtttggccgggcgcggtggctcacgcctataatcccagcactttgggaggctgaggtgggtggattatgaggtcaggggttcgagaccagcctgaccaacatggtgaaaccccgtctctactaaaaatacaaaaaaattagctgggcatggtggcgggcgcctgtaatctcagctactcaggaggctgaggcaggagaattgcttgaacctgggaggtgggggttgcagtgagccgagatcgcgccactgccctccagcctgggcgacagagcaagactctgtctcaaacaaacaaacaaacaaacaaaaaaacaaataatagtttaatggctatatttttaattttaaaaagcttctgaaatgagaaactttaaaagtccaaaagaaaaatgtacaaagaatataaatttaccttaaagcagaaagaattgtcactagtcaaaaatatatatgagaaaatatgcgccctgttcaggcagaccagggacaggagtgcagactctgtgtgtgtttcttttatttctcttttagcaactggtactctttttcttttttttctattgacctattgtaacgggtaaaaccacaaatatgctatttagtagaaatggggagagtggacaccttgccttattccctatcttaaaggaaaaacattcagtgttcatcattaagtaaaatgtcaccgtatgtactttagagatgcttttttttggttgatgaagttcccttctcttagtttaatgagatttttatcaggagtggatgttgaatatggtgaaatgtgtttcttatctattgtggtaatagtgttttatttttagtctgtttttatggtaagttacacattgattctgtaatttgaaataaccttacattctagagataaatcccctttggtcacaatgtatcatctttttatgtattactagattcaatttgctgtattttgtcagtgggcatttgcttctacattcacgttggatgttggtttgtttctcttcatgttgtgcctttgcctgttttggcgtcagggcattggtgtaatcctggcctgtccatacgaattagaaagtgtctttttgtgccaggcacggtggctcacgcttgtaatcccagcacgttgggaggccaaggcagacagatcacctgaggtcaggagattgagaccagcctggccaacatggtgaaaccccatctctactaaaaatacaaaaattagccaggcatagtggcaggcacctgtaatcgcagttactcaggagaggcaggagaattgcttgaacccaggagacggaggttgctgtgagccgagattgtgccactgcaatccagcttgggcaacagagcgagactctgtctcaaaattaaaaaaaaaaaagtgtctttttatagttccacagatttcctttagtatttgtattatttcttgcataaaattcatgcagaatgcatttgagcctggaattttatttcaagcgtttttttttaactataaattcagcttctatgataagggcttattcacattattcattcttgaatgaattttgatagtgtctgtctttcaggaactttgtcctaagtaatgaaatcctttgataaaaagttgtttgcaatatttcttatgtgtttaaagtctataggttctgtggtgatgccccttttccatttgtaatactcttaatttaggtcttttctgtctgttttttaaaaataaatcagtctcccagttaattatcaatttttagtgttcttttcaaaggatacattttaaatctcatttattttttattttggcctttttgaagttcattgatttttgtgcttattattttctcagtgcttgcttttggacttattttggttgtgtttttcctgattcttaaggtggagtcttatgtttctgatctggggtatttcttgccttttattgccagtgtttaccaccatgtattacctatagagtggtgctttaatcccttcccataagttcttatgtcttctttttggaagtgtctgttcatgtcctttaaccattttttaatgggattatttcttttttgcttattgatctgttgaagttacttatggattgtggtattagatctttgctagatacatagttttcaaatatttcctttcatcctgtaggttgtctttttactctattgataagtttattttgctatgcagaaactctttagtttaattaggtcctatttgtcaatgtttggttttgttccaattgcttttggagtctttgttacgaagtctttgccactccctatgtccagagtgtctcggttttccttctagagtttttatagttttaggttttacatctaagtctttaatgcatttcgagttgattttagtatatggtgaaaggaggggtccagtttcaatcttctccatatggcaagtcagttatcaccagctccatttattgaattggagggtccttcccacactgatggtttatgttgcctttgtcaaagattagatgatttcaggtgtgtggctttatttctgggcttgctactcggttccattggcctgtgtttgtttttgtacctgtaccatgctgttttggccactgtagctttgtagtatagtttgaagttgggtaatgttgtgcctccagctttgttccttttgctgaggattgctttggctattcaagctctttttttgtgccatatgaattttataatagttttttttctaattctgtgaagaatgtccttggttgtttgaaagaaatagcattgaatctgtaaattactttggacagtacattttaacactattgattcttcttatccatgagcatggaatgtttttctgtttgtttgtgtcatctctgatttctttcaacagtgttatctaattcttattatagagatatttcacctccctgcttagctgtgcttctagatattttatttttgtgtgtgattatggtgaacaggattgcttcttgatttggcacttgctttggaagttattggtgtttagaaatgctactgagttttgtatattcattttatatcctgaaactttgctgaagttgtttatcagatctaggagcttttgggcagagactgtaaggttttctaggtgtagaatcatattgtctgcaaacagagataattcaactttcactcttcctatttgtatgccttttaattctgtctcttgcctaattgctctggctaggaatttccaatactgtgttgaataggagtggtgagagtgggcatccctgtctgcttctggttctccaggggaacttccagcttttgtccattcagtatgatgttgactgtgggtttgtcatagacagctcttactattttgaggaatataccttcattgcctagtttgcggagggcttttaatatgaagggatgttgaattttatcaaaagccttttctgcatctattgagatgatcatgtggttttggtttttagttacatttatgtgatgaattacatttatttgttttgtatgttgaaccaaccttgcatcccagggataaagcctacctaattgtgtggataagctttttgatatgctgctggattcagtttgttaatatttgaggattttttttaattatttaagttgtagggtacatgtgcacaatgtgcaggttagttacatatgtatacatgtgccatgctggtgcgctgcacccactaactcatcatctagcattaggtatatctcccaatgctatccctcccccctccccccaccccacaacagtccccagagtatgatgttccccttcctgtgtccatgtgttctcattgttcaattcccacctatgagtgagaatacgcggtgtttggttttttgttcttgcgatagtttactgagaatgatgatttccaatttcatccatgtccctacaaaggacatgaactcatcattttttatggctgcatagtattccatggtgtatatgtgccacattttcttaatccagtctatcattgttggacatttgggttggttccaagtctttgctattgtgaataatgccacaataaacatacgtgtgcatgtgtctttatagcagcatgatttatagtcctttgggtatatacccagtaatgggatggctgggtcaaatggtatttctagttctagatccctgaggaatcgccatgaacagacacttctcaaaagaagacatttatgcagccaaaaaacacatgaaaaaatgctcaccatcactggccatcagagaaatgcaaatcaaaaccacagtgagatatcatctcacaccagttagaatggcaatcattaaaaagtcaggaaacaacaggtgctggagaggatgtggagaaataggaacacttttacactgttggtgggattgtttgaggacttttgcatctatgttcatcaaggagattggcctgaagtttcctttttttggttatgtctgttggtattggaatgatgctggcttcctagaatgagttatggaggaatccttcttctgcaatgttttggaatagtttcattaggaatgataccagcttttcttgacttgtctgtgaatttgtttgtgaatttgtctggtcctggggattttctggttgataggcttttattgtttgtttgtttttttatcactgatttaattttggaacttgttatgttactggtctgttcagcatttgaatttcttactggttctcccttggaaagttgtatgtttctaggaatttattcatttcttttaggttttttagtttgtgttcatagaggtgttcataatagtctctttttttgtatttctgtggggtcagtggtaatgtcttttttgtcatttctgattgtttttatttagatcttttctctttttttaaattagtctggctagcagtatatccatcttatttatttttttaaagagcaaatttgtggttttgctaatcttttgtatgttttttcatgtgtgtttccattgcattcagttcaactctaattttgtttcttttcttctgctagctttggggtcagtttcctcctttttttttttctcattccttaagatatgatgttaggttgttaattggaggtcttttttaactttttgatatgggtgttcagcactataaacttttgtcttaatactgctttaggtgtgttccagagattctggtatgttgtatctttgttctcattagtttcaaataattttttatttctgccttactttctttgtttacttagaagacattcaggagcaggttgtttaatttccatgtatagttttgagtgattttcttgttattgatttctatttttattgtggtcaaagaatgtggttgatattcttttttaatttgctgagaattgttttatggtctattgtgtggttgattttagagtttctaatatgtgcagatgagaataatgtatattctgttgtttgggggtatagagctctgtagatatctattaggtttatttggtcaaatactaagttctggtcccaaatgtctctctagtttttggccttcatgctctttctaatactaccagtgtggtgttaaagtctcccactcttactgtacttagtctcctcataagtttctaagtacgtgttttatgaatctgggtgctcctgtgttgagtccatacacatttagcatagttaagtctccttgatgtgaaccctttaccattgtatgaggtccttctttgtcttctttgattgtcgttggtttaaattctgttttgtccaaaattagagtagtaactcctgcttttttttacacatctaacaagcaaacagaaaaaacagcaggagttacagatgatgtgttataatatacatcttccacttgacactattgatacagtttggatctgtgtccccacccaaatctcatgtcggatcatcatcataatattggaggtggagcctggtgggaagtgattggatcgtgggtgtggatttctcatggatggtttggcaccatccccttggtactgtcctcctgatagtgagtgagttctcatgagatctggttgtgtaacagtgtgtagcaaccccacccctttactcttgctcccaccatatatgacctcttgctcccactttgtcttccaccatgattggaagctccctgaggcctccccagaagcagaagccactatgcttcctgtacagcctgcagaactgtgagccaattaaacctcttttctttataaattactcagtctcaggtatttatagcaatttgagaacagactaatacaagtatctactactatgtgacagtataccattttagtgtcttgtaacatttacatatatttcttacctctcatattttgctctagttagcatatgttttgcttccatgtttttaggaaactctagtacattctttgtttgatttcaatgatcagtaattcttatagcaaattaaaaacaatcctctttttgatatactgtcctttatccctttatttaatccgtatttctgtctgacatcacagttcttcctggagaacatcctttagcatttcttgtgatgctgatctgttgccagtgaattctctcagcttttgttgttctgaaggcatatttaggtaaatttccctacattttatgaaagttatttttgctgagtatggatttctggattgaaagttttttcagtgttttttgtttcaactactttcagggagttttctttacctttggctttctggagttgagtgtaaggttgaggttttgttttgttttgttgagtttttgccattgagggacgggcgtattaacctgtttgggattctctgggcttcttgggggtgtgtgtgtatatacatgtatatatatatatttttttttacttggatatagttgttttttactaattttggaactctttattattaactctttgaacatgcctctgcctttttctttttctcctctctttctagaactgtaactgcctgttactgagtttctgattttcccacagctctgatatgttctttctgttcttcctttttcatttttgttgtgtttcagtttttataccttattttgatttgtcctcaggtgtctttattctttcctccgctgtgtccagttgtctagcaagccccatggaagggattcatgctgatgctctgtattgctttcattcatttagttttgtcttttaaatgtctaggttttcagctttttttgctcagattttccatctgtccatgtgtttcattaaactcgtctcttacacacttgaacatccaaatctcagtcattttgaaatttctgtctggtatctcaggaccagtgttatccctgggcctgtctctgtgatggcttcatttcctgaaaatggatttatttatttatggttatttttggtttttttagcttataaaactaagaaagaaggaagtggtggcctcttctttggccggatgttaccgagagtgttgagttgagctgggtggttgatcttcgttgttgtcatccccttagaagtcaccttcagagaccacaagcctcacatcctccgaggtgggctgctccttctgtgggctcatgagccatggcgctggagagctttgccccatgttcatgctccacatggtgtagcaggaccccaagcctgggggcagaaggacagggcctccccacgagtgttcccccacaggaagctgcacccgttacctggccgtggtaaggcactgcttggttttcctgatcctgcctcttttccaggcagccctgtcagtttgaccctggggtgagcgttagggcatcagtgcataagtgacccctgcatgcaggagctggacactggtttccttgggtgtcctccctgcctcagtctttgctggacctgtcgaggctgctggtgagggagggagattttctgaatcattcatgaagctctaggttttcaaaggtgtcttatcagctgaagtttctaaaatgttgctggcttcctcccagcttgttttttggcagcatttcctactctggagctctgccaatcgtgaagtctttcaatcctgtctccattcagagggactttttactctctggaatgtagttcactttgttgccttgaagccatagttctggtgggttcaagttaatttgtgcttttacactctctgacattctctgtggttagggtagacactatgccttctcatggctttatgtattctacatatataccccaaactaaacaaaaaataaaatctcatctatcctaattttctgcccttgtattttattaattctgcacattaggtcatttgaaacagagagtgcatgaagaaggtgaaacatacacatggatatcacacacacacttgcactcactcacacccaggagcaaacaacatgcgcttgcacccactcacacccatgaacaaaccacaccacacacttgcactaacacccgtgagcaataacaccacacccttccactcacacttggaagcaaacaccatgtgcttgcactcacacccctgagcaaacaccacacgcttggactcacacctgtgagcaaacaccacatgcttgcactcacacccatgagcaaacaccacacgcttggactcacacctgtgagcaaacactatacatttgcacttacacccatgagcaaacaccacatgcttggactcacacctgtgagcaaacaacacgtgcttgcactcacacttgtgagcaaaccacaccacacacttggacccactcacatccatgagcaaacagcaacagttcccctgtgactcttaggagatttgcaggagaaagtctctggggcaaggagtattgagtacattgacatctactatataataagctctaaagattaattaaggaataagccaagaaaatacaaacccaaaacagaaccctctacatacctacccacccatccgcctacaccacatacagcttaatgtttgacaaaaaatacctactgtgttttaaacaaaaaaatctaagcataattgaagactggaattaattgtgtgttcatcctgaatgtatttagtaaattgtgagtttagctatgtaactttttaaataaatgtgttgataacaaaagctattgatatatgtccatatagctattattactgtgtttattccccaagatctctttcaagatgttactttaccagacagtaacctttattaatgtgttatgaaaatcttctgatactggacaaataagccaaaacaagaaaagtacaatggcttcttagataatattgcacataagacaacatcaggacagtctgttgtctcttggttacgtataattatggcgcatagtgcctgccagtgataggaacagggtctcccacaactgctcttttcttcagagaagagaaacctgtggcttagaatgcatttgaagagttggatgaaatgtatttgaaggatacaaggcgatgaatctggagtttgtggtgtgcttatcaacagaataattagaagcaattcatattcaaggtaaatagaaaaattatggatcttttgaagtggaaagttctatcaattctgtaaaattttatcatgaaataacatttgtgtttgagtggtattttgagttgtgaaggtttgaagctggggaggaagagaaacacgagccagcacgctgtgacatatcgatgttgtgatgagcttgagtggttctctatgtgtacattgtctttggaatgattgagaggtggagtccaaggccttgttagtaaatgtggaagccagcgattgttcttgcttcccctgctccgtccccacctccctgtccttgtttcttctttcctcctttatcagcctgagctcttctccgagttttgcctgagagcagaagcatgacagtgctccggtgtgcacgggggctctggtgctcttcaaggtttgcttaaagctaaaatagcgcatcttctatcacccatttcggaacacatcagtgatgagtgttgttcagtaatgtcatccctacacatttacaatcctggtggcacctgctgtccactccccagccctgtcctctgcccctctgagctcctcttctgagcagatgagcaggtctgtgcaacccccactcaagaacccccatccgtctccctccctgccttactgcttccactcctgccacaccccctcccccatcttccagatttgctcagtttacccagcagctctccagaggcagcctcagccaaggcgagtggaggccatggggagcaccaggctgctggtctgctggtgggtaaggccaagggtcttgtgggatttctcaaggattggaggtggcagccccacctggcagacaccatcgtatatgcctgctctctgcacggccttcctagcttcctcctgccaccattcactgttaatgtaggtgatccaggaagccgcaggttcttctctgaagaaaagagcagttgtgggagagcctgttcctatcactgacaggcagtacacgctgtaagtatatataatccagagacaacggattgtcctagttttattttatgtgcaatattatgtaagaaaccattgtacttttcttgttatggcttatttgccctgcgttagaagattttcaaacatgttagtaaaggtgcctgcctggtaatgtctgtgaaggtggtccagggagcagcgtgaatggtggcaggaggcccctgtgcccacggcctgctttgagtctgctgtgggaaagttcgctggatttaactgattccccattatctcttaagctccttcttcaccacccagtcctctgcctcaccttcccctgacccgctgcctccaccctgttttaaggcaccgtatcctgcacttgcactagttaataaaataaccgacagcttccctcccacttgggaacctttgccatctctgtcgctcaatggtccatcttgcctgtgagtcgtaagtcaggtctcatccccttggtggtttaaactcatcgacagctactcattgcttctaggatgggatcagagcctcactgtgcctcaccttaactagaccttaccgagatcaggacctgcctgcgttgccaacgtcacggccatgtggttcttccataacctcatttccgccctccacaatctccgctctgttttctgaggatggcagagccttcccgcctcgtgccacctactcctcttcaagtaactgatctcatctctttcatctcagctcactggtttctgagaatggccttcttggaagacctcatgtaagatcgctgtcattatctgtaacatcagcctacgtattgatttcatgaaggttatcaaaatcagtacttctcttgtatatttattcatacttgtttccttgtttattgtgtgtgaccccattgaagcatgggatggagacatacccaacatgggcgaatccacccaacttgatgagtgattgcctctggccagtgaaggcgagagggggcaaaggtcacagtgaggggcctggagtgcccttgctgagctgggagatgcagctcgtggtgcaggatgatgcgggagtgatggggagttggggtgtctgttcccacactttatcatagctcagtatacgtggaaaatagtggagaaaagtacattagtaaaagtgattcaggcattattcaacgttcttttttccagaattagaaattattacttttcattcaagtttagttggtaaatgtcatctgatatttttcagagaccagatccaaaactttaattattatccaacaaggaacatatctcaaaaattaaataaaaaggaattttgggggatgccataaacttaaggaggtataaattttccctgtcttgtttttaattctccgcttatcaagtaataagattcaaccttctaggtggtatttcccccacgtttgctgaagccttctgcccctgtgattcatggtagccactcatacaatttgctaaccggggctgaaagctgttagaaatgacttttaaaatatatattttctgacctatgaggatattttaatgtgtgcaataagcggatgtcttatgcacaaaaggagttctgaaattctgagtacaggtaagtctcgcaatgagaagatggctgagtcttagtctcatgttctcactaatcaagtgtatgaacctgggaaagtcccttagcttatttgggctagaatgtcctcatccataaagtcatttataaggatgaacctgttgataattttaagtcagattgctgaatattatgtattcattttaaaaaatgagcacttggtgtgttgcaggctccctgcgttgaggattggatgtgtgtaaaccaaggccctgctcttcttaatcgcaatctcctagggagcattgaagtgacattaaattcaatttcaatgaaaggaaaatggaaatcaaatggaaattgaaatgaaaatcaaatggaaattgaaatgaaaatattaccatggccttggtggacagctggtatactggcttttgggttgggggggtattgacctggtttgtggtgaaagctgatttctgtggtataaatacatctatagtggctgcttcaggcatcagtggtttcattaccagtttgcagcattccccagtatttaacagtgctctgccgtgctggtgcaatgaagaattcaaggagataattgattaagtaagaaggtagcatttaggtacaaatgctgcacaaatggcctcataggcatccccggaaggcagggtggggtttgaaggaggaatgggagcttgcccgtcgggctgtgcccagccttgctggccatgttggtcaccatgtatctttgtggtttttaccacacagctcctctcggtgacctgtccttttggccttttgggaagctgggaggtgtcctaaactcgccccgtggctttgttgctaaggaatatgctccccaaaagtggttttaggaaagttgcttcattgtctctggtctttttctgctctcctttaaaaagacatttgcttttctcaagaccgggaacaaatcagccctacttatgcaaatgtgtgggtttctttcaaacagctgctacagtggagtgattttccattttaagatcttttaactcttagtggcatatttgcaactttctaacacattgaatgtccacagagaactaacaccttgtaacaaagttattgccaaagtttatagagattataatttaagttatgttaaatacattatgaaagaattatgccacattttgttaataattaagtatataaataattaagtatataaaaacaaacacaaaaagtaagtaaatttttattcaaaatttttaatggatgaaatcttttagaagataggttattttatataaaattttatgccagagagtatctatgacttccatgtgacttgtttgaattcaagctgagctcaaatacagaattccaaattaccatcctccttatagttaattcttcatcacacagccatctaaacaagtgctgtgtattcatgttagggtccaggtacagttgtatgttacagttacatgttaggatccagtgctcagttacaactcggtcctgggcctcctctttaaaggtgagcaggtgggagaggagagtttcctagtaaacacgagaaagaataagcatccttgagtaaactaaaacagctgatgatgaataattcatacaacgattctgtttcctatggatctgtgtggaagatagtactagaaggaaatatggtatttctaagtcattgggactctgccaggaatacagaaaacaatacattttggatgacaacattcacgttttcatcttgtttcattttaaatttaagagacagtgaacttttggtttatcacttattttaccaagaatacaatgatttctacagagctcacattttactacctgatgcttatctgaaattttagcttcatacaagccatccagtatgtgtaagtatattattataaggggataggcctagtgtttatagacacatgtacacacacacacacacacacacacatttatatatgttcttttaaaaagggatgtgatgaaaccttgttttaatatttgacatgacaaaaaagaaatacttttcattttccttgaaagacattaacgggttagataataaaggatagtagcttcttttccccatccatgctgtcagtactacgttccagatacctaggacctcgtaaattctgacttcttaatcatcatgacagcccaattacctagccctattatttttcttattttacttatagggaaacttaggcaataagaagttaaatgagtagcccaaggttagagctggtgatgttcaggactgaaatttgaatcttggcaggctgtgtcctgaatttgaaatatgaaccaccctccagcatgcttctcaggtaccatttttactactgttcagactcattctattgtagctttgcttttcatgatcaaggtgtttgtatctaacaggagtgtgactttgagcaagggacaaaatatgtgaacaaatagctgcctgttctcctcaaggctcagcagcttcatcaagcaaatggcagtggtttgggtgatttccaggctgggccctgttgattcacatgaaatatgctttccattgtagtatataatgttgctgtttccaggcatgcacacacatgcatgtacacacaaaagtatacaaacgcatgcatgtgcagacacacacttccacaagcacatgtgcacacacatgcacaacacacaaatgcatatgcacacatgctcacacatgcacatgagtgcacatgtgtcctacacatgcaagcactcacacatgttccaaactcatgagcacacacatgcacacacacatgcctgcacacacatacgtattcaaggacatgcctgtgcccacacatatgcacatatgcatatacacacaggtgcacagacgtgtgctcatacatgcacatgaacacagacctgcatacatgtgagtgcacacatatacacatgcacacacaaacaagtcgtacacacatgcacattaatgcatgtccctacatgaacatgagtacacacatgcccccacacttgcaagcagacatgtataccatgcacatgaaactatgcacacacaaatgcccatgcatgcacgtgaacacacacgtccacacagatgcacacagatatacattcacatgcgtttgtgcacacacatgccccacacagatgcacactcacatgcacatgaacacacatgtccacacagatgtacacagatgcacactcacatgcacttgtgcacacacgtgtccacacagatgcacacagacacacactcacaagcacttgtgcacacacatgtccacacccacacacatgcatctccaggctttttctttggctgctaatctcttttaacagctgtcttcaaacctgaatcttggtctttccataaatttattaagtcactcacctgtgttggcaaagccctaaatagaatcctgctctccttgttttcttgagttttattttttttaatgatgcaaaaacttgcagtgtccttcacagtgtatacattgttttaatataaagtaagccttacagttaccagttagaggaattcacgttccacactttttctttgagaataattggtgtttcaaagatgtgccctattaatctggatgctccctgcacaccccctcggtacacggaggacacgggcatgtcccagccccacctcctctatccctactgcaggggtgaaaacaccggagactctgcaggttgcttttctaggttttttgtgttcctgttccctcctggttgtgagtaaagttgagtagttagtaatgcactaatgtaaaatacgaaatgtgattccaatcaaaaacatcttcagattgtgagactaataccatgaacacccttcatattaaagtcagcgtgcatgcagtgggtttctgaaagaagcagcgtggacaggactcccgtgggcagggcccctgtcactgtgcctgggcagctatctcttctcttgtgctcactcagcacctcgggttagtattgaccgtggccctcattcaacactgattgtggacttggtcactttgtaactgagcctcgcctagaatggaagtcccaaggtgcagagactgtgcctggaggaaactgtgagacactaaaaccccatcccaaggagggggaatctgtgcaacaaatggtcaggatgaagcagaggctctcttccatagaagctgcggaggtagtggtcaggatgaagcagaagctgcaggggtggtggtcaggatgaagaagctgcagaggtgatgtcaggatgaagaagctgcagaggtggtgtcaggatgaagaagttgcagaggtggaggttgggatgaagcagaggctctcttctgtagaagttgtggaagtggtggtcaggatgaagaagctgcggaggtggaggtcgtgatgaagcagaggctttttagcagaagctgcagaggtggtggtcaggatgcagaagctgcagaggtggaggttgggatgaagaagttgcagaggtggaggttgggatgaagcagaggctctcttccatagaagctgcggaggtggtggtcaggatgaagaagctgcagaggtggaagtcgggatgaagaagttgcagaggtggaggtcgggatgaagcagaggctctttagcagaagctgcagaggtggtggtcaggctgccccatctatcatcacgctctgatttaatcaggtgctgcctcccacccttcctgcccaacttggtgcctcctgcatgactttcaggggggctgcgaagcaggtgtcccagatctaaccctccgaaatagtcactctccgccctggggccagaatcgtgtttgcagcctccagcccacctgcccttctcctgttctgcactcagtggctcccgttgccccaggatgaactctgagctcctaagtgtacgctgaccttcagtcttgattcatgtccctggttggatttaaagtgttgtaggtaccagttttcttagaaattggtccagaatatattgagtagagggagattaaaagatcaagacatacttctcacttgtgggcaccctccaccatggagcctggagaatcactgaggaatgggaggagggatgagggtgttcagagggcagaggtgggtgcagaactcacctggccattgccacttgggagaagtcgggctccacacagcatggcctctgagatgtctgtgtccctgtgtccctgagggtcagtgtcaagaggaggccagactgtgtctgaaagagctgtgggcacacccctttgttgaagggctgcagagaggggcggtggcaccaagctgccccattgctgaggggccaggtggcaggagctctgtgagccacacatccctcggctgcttggcattgcagaggtgacgctattgaatcacactttaccctggggttcttgtacaaaccagatgcacttttggagaagaaaaataagcctcacttatttcgaacagccttcccacttttacccaaaagaaacaaagctttttttttttttttttaatagcacactttcatgcagttaattaagataaaatgaaaacaaagggcaaaatctcctctctggttggtgatggaaatgggaagtgcgtgtttcttctaccaagggaaggaggctcaaatcttccagcatgaggctttttcatttcactcatttctccacggtccaagcaggagctctgtgctgtttgctgggtagaagatactcggtgcttccttgctctctgctaaatgccatctaccctctcccatcccctctcgtcctccctggtccctttggtgcactctgactgcttctggttccccactctgtggcctcacctgtctgtcctgagcgccatgaggtcagctgtggccctgccgtcctgaaattgctccttcacttggcacatcctgccatcatcagcggcctccatgagggcactgccttagctccgtgactcaggacagtgctaaagaagtcagtgtgttctcagcggggaagacgagggtaacagacgtccaggtgctgcgtcagctccacggggagggaagcacccacttctcagttcctgaacccagaccttaggtcttcaagtctaatgcttattttattggggcacagtagaagttttattatcaatcagaatttaacaaggattgacatgaacctatttgtttcttttacatagttttcttcagtaacactagaaaagacagttctaggctgcacaatttgctgggggagtttttctgtgcagaagcatattatatgtccatttttttccccaaaaacaatcacctcaatttgtgaagacaaaatccgatcatcaagtgttgcctgaaaagcaaatatatatcactctcattcttagacataatgtggcttctgcagaccacacgccactccctcctaaagaaaacagcacggactcccctccaggaagagcttttcctgctgaatttatatcgggttccatcaaagaaaagcgacggaaatgcatgtgcctgcagccattaaacagaaagacaagttgatttttttttttggcaaatttagaaactggtgagaaaacgtttcatgctagagcaacttctgtaattaagatattttcttcctctaaaatagaagggtttgtgtgagctcagggatgtgtcttttttctttcctaggaagtggaaaaaccagaccctcaaattaagctgaggggccctgctaggaataagagggcctgcagctccccagctccccctctgctgggccaggcagagacaccctgggaggatctaatcctcaaaccaaggccattttgctttttaactttgggggatatgcacaggataattttcagagagaaacagatgctggtaaactgatatctcaggccttcagtcagaaatctagcattctctgtggttgattttatggtattcttgcctacacaagttggtaagtaacccgtcttctgataggaccgtctgagagcagtttcacctaaaggaagccgacgctggttggctttttatcctagctgctttcagttggcgtaaatgtttctcctttatcacgtgaatcctcttaactttaattttattgcaagaatgattaatattgagacagccaagtgttatcacagtttcatggacaagaaagagacaatatgtggaagaaaagtactgtgtttggagacccaacctatttttattttatttttctgagaagcaaagctcagaaaggaagaggggagagggatttgtattttatttatttctttttactatttacagggaaaaatacattccctgcaaataatagagagagagagagagagagagagagagagagagagagagagatcagaggatttcccatgtgctgagtatcaattttcctttcacacagtcttgcatggggggctggggaagcactgagcacaggcagctcatttggggacatggccgggatggcccctgtactctcatggcctgagcagagttgtggcccctggggtggcctcccagacctccttctcacacgctctaccagggttgtttgggatgcaatgacaaaggtaactttaccctttagagaagagaaaatctcacctggaatcaggtttctgttttcatttttaacatttgaaaaaatgccccttgacgtgagttgaactagactaacagataatgctgatttacctaaataggacttcccatgtaggaatggacagatgttgtgaatgaggttgtcatggttagttaaaaagggaagatttcagataagacacatttggaaccttctggacagctcaggatcccctaagaaggatcggcataccagtggctgagcctgatgctcacattgtatttaatagcctctacctccttaaagactatcggagattctgtgaaatgtctaggcaagattgctttcttagcaagtggaacatttttttctaccttaaatagagggttcgttcttttagtagaaaagataaaatgtagcagtgttctaatcaaagcacagattgtgttgtttaaagaaaatgtccttggcaatacagaaaaatagaacatattagaaaaaccaataaatacttagcaattttagagtacataactacgggctaaattttatagaatattctcaatagctttttagattaaaatgggaatacttgcagctattttatatttgagtaacacattcgattatcgttatatatgtttttacaaataattttcagacacatgtgtttgaagtgttgctcatgtccttagcatgtgctgggtgctttgggaaatgcaaaagttctagaaaacacagcctctatcctccaggtggttgccatctgcctgggcaggaaaacatccctgaagtggcaggaggtgataaaaggtggaatgcagtcaggtcccggaaacgctgtaggaacttagaggagatggagcttttggagcctgggatggttgtgccaggactgagaaggagaggtgaggctagactgcgctgggttaaagccagcaggagaatggcacactgcaggtgtggtgggcagagatggtccccatggatgtcggcgtcctgatcctgaactgtgaacactggaccttaggcagcaagagcttccgcagaggtgggtctgtgaagtctcctggggtggagaccttctgggatgatcttgtggccagtgtgtcacgggggcctttacagtaggggcaggattgtcagcgtcagaggagaggtgaggatggaaggagaggttcgcggttaagtgcctggagccaggggactccagcgtctctagcggctggagaaagcaagggaagattctcccgagaactctgaaagccgagcagcccttctgacgcctcgatttcaggacttccgagttccagagccgtgagcgaatacatctgcatctttaagccactgcatatgtggtcctttgtctcagcagctctaggaaaccaaggggaggctggggagagaggcctggaggacaggagggttgatggggcctccgcagatgaagggaggcctcctagacaaggacagggttactgaggagaagactgaggagaaggttctggagatgtggaaggaaggccgcgcagccttgcccatcaccagcgctctccgctccatttctgcccggcagttccagcccctgggtctgcgcccaggatgacaccccacgtgggcctctccaggccgctcggctgcccagatgcagcttcttcctgccctcagcctcgccctgctcgccacagcccgtcttcctcctcatcacctcatggggagcctcccgcccctttggcaggacgcagtcacatactgactttccgttcctttaagaagtacgcatctttcccagcctgtaacattgagaggaaacaaggctttcttgggacatcatcaagaggtcacaccaaagacatgggggaccgaggcgtggacactcaggtggggagagcctgtggccgcccaaggcccatgctcagatgtaatcatagagccacaactatgatcaagattagacactcatgaccccagaggccctgagtccattgcagttaatcccatcccatccctcctggccatactggcctgttctgtgtccctagagttgttgtgccttttccagatgtcaaataagtagaattttaccacgtggagttttgattttttttggcttcttttttcagacttctttggcttatcgcaatgcttccaaaactcacccgtgaggatgcggggtcaatagggtgttatcctgggttgaggtgccacagtctgctcagccttcatctgtggatgggtgttttgattgcttccaggcttaggcagttgtgaataaagtggctgtgggcgttcatacgtggacgctatagacacgatttccattgctcttgggttaagctcccaggagtgtgcctgctggtcattttaggaagtatattcgcaattttatgggatttttttttttgcatttttatataaatgtaaaatcactttctccatttctacaaaaacacctggtgccattttaattgtgattttatgtgtatatagctcaactggtgaaacatgtcaaaaatactgaatttttcaatctatgaacataatacatttcttatttagatctcctttgaattctaccagccatgttttacaattttcgttgcatgtgtcttgcacatattttgttaagtttatgactaaatgttcatatactttattttattgtaatttttttaaatttcagttttcaaatatttcctattgttaccatacataaattcaactgattttgtttactttctttatatcttgtgactgtcaaacttgtttagtagttttgttggctttatttttagattattcaagattttctatgtaggcaatcatgttatctgggataaagatagtgttacttctttctccctaacgtatgacttcttttttattttttccttccatcttgcattgggtaggatctctaataaaatgttaaaaagacaagagaggggagtatcctagtggtgttcctgatttcagggataaatagtccctttttctccattaattgtcacactcagtagattgtcagtttgagaaggtccctgtttccattcctagtttgctgagggtttttaatcctaaattgtgttgaatttagtggaaaacttactttgcatctattgtgatgttcatatgattttagttttgtagtctgatatggtgtatcacattgattttcaaatgtttatgtaaacgtgcaatactggtgtaactctcaatagggattatgtatttttcttttaatccactgctgaaaattactgacttcattttgttagctatttgcagttaactttatgaggcttataatccccaattttctctcataatatatttgctttcgataattctggcattataaaacgagttggaacatgttccctctcctattatattttagaaggttttgaaataacctagcagtaaagcgacttaagactagacccttctttgtggaaataatgcaattcttttgttagatttagggcaagtcaggttatctgtatcttctcaagtgaactttggctgttggactctgtcaacgcgcttgtcattttaatctaagttatgcagtttactgcatagagaaaggaagccaaggggaccctgctgcatggtccaggacaggggtggcatccagtcacggctccgctctgtgtcctgccctgagctcctccaggagctgggagcagctgctgacccctttgtggttattctgactcacacgcagctttatgcctttgctaacctttgacctttcttttaaaaatccgcttttattgctgccatcttttccttctattctttactaaaggcaaagagctcatgggttctcactgccatcagaggggctggacgtccatggccattcagttcctctgtttgcttggagcctggctctggagccgcctcagagaggccttgctgtgtactttgcaggtgctaatcagaggaggagctccaccagaggcatctcagtcagcccaagcctctgcaaccaaatcccacagacctggtggcttcaacagattctggaggctagaaattcaagatgtaggtgttgggagttggtagcttcagtgtctgatgagggcctgcttctgggttcacagatggccctttctcactgtgtcctctcgtggtgggggagctctcctgcctctttctcctattacaggggcacagatcacatgaggaggctcaacctccatgacctaataatctcccaaagaccccacctcctaacaccatcacattgcagattagagcttcaacatcatctaggaattttaggaggacccagatattcagtccataacaacacttaattataaattgtgagcataattttttgtcagttctatgcattatcaattttgatgtgcacattttattgaacctggagagaaagcacattattaaaataaatgcaataaaattggtgtacaataactctttttatatcattcctaattctggaaatgccgtcctaagtcagagggaaaagttggcacccttttcttagaaaaaaaaaaagaatgagaaaattcaccttttaaaatagtcattaactctttatttttgcaggttggaaggcatatattgtattatttttaaagggaaatctggatgcttttctttttttaatcataatttactgacctttctttcaatctcccatttacttgttaagtacttaccatcctaagatcagtaaaaaccttaagatatgctgatgatatatatctggtcacactacagagaagactttctcttaatttgcctgtttctgctggtaatgagatgatttagtaccagagacagagaaaaccagatggcaattgtgttgttccataactgcagggattatagctagttctccctgaaagtctatgtattaatgtctaatggatttcaaggatgaatgccacaacctcaaagaatgattcaatttcctaagtcttgcctcattgttaaaatagtcagtacattaaattgaagttgtggagaagggagcttataagttctgtaatattacacacacacacacacacacacacacacacacacaattatgactttaattctagaatgacaaggcaggctataattatttatacccacaaatggaccttatcagttagaatatttatagttaatactttactaatcctcctggcttattctgttttccataatcctgttatagttttgacctaatactcatgaatggggatgtgaggcatgttttttgctccaggtagcacccagggcatcggccctagatggaggcttgatgctacttggaaaatggcgaagacaacactgtccgcagtaatggcatctagggctgattgctggacaagcatttcccggcacagggaaggcacagctggttcaggtttcccaggaatgagttacctgcatgtcatcctgagaccaggcagcagtggtgacagcaaattcattctcggttcattgtaattatcaataaatgataagaaatttcgtgagagattgttgcccttaagcttaaatctgggagaggaattaattttgttctgaagcagactggcagggagcgcttgtaagtgatgctgtgctcacctgttaagtcaagaagcaaaagtgacagaaacattgactccactatgacccagcatgcacctatagtatcaggcatgtgatgcagatgaaggaaataacacaccgtgacccagcatgcacctgcagcatgaggcatgcgaagcagataatggaaataacctcagataggattttcttttgaaggaaacatattttatataaattatcaatactgcggaactgaaaagcacacatttgattattttgtaaagcaaaaaggtacattcacagaacaggaagcagaaaagaaatattggggaaattgagttagtgatatggagaaaattatgctaagaaaaaaagacaagtaaaaatatgagatagtggatagtaggtacaaaggacaaaacacatgataaatatccctactgaagaaattaaatgaaacagatgtgataatcaaattacaactacaaaactttcttgatacagtatttagtatttagttttggcaccctcaggatacactgttgacaagaatttcaaaaataaatgaaatatttaataaaagacttcaagaatctttgcaatacaagatgagtgaatgaatgaatggaataaattaccatcaactgacccaaatctaccttctctcagacttcatttctgaataactttggaatatcttcccaatttacaagagtgagattaggaccaggaatttgctccccttccacattgcatttcatatgtgacagtgcagggagtcattttatgacaattaagttcatgttgaaaagcagctgccaacatattgtctctttgaggccatcacacagtggcctgtccaaatctttattcccaaagctgtcttattcttttatagtatcatgcaccatactattcaccaaaagtctgcagttcggtggtttgttgtgtattcacagagctgtgcagccatccctatagtccaatttaagaactctttagcacccttaatataaaaccccatgtccattaagcaatcagtcctgattacccctccccccaaatcctggcaacatcaaatctactttatatctctaaagatttgccttctgtggacattttacatagtgttggtcatacagttggtcttttgtgggttctttttttttttttttttattatactctaagttttagggtacatgtgcacattgtgcaggttagttacatatgtatacatgtgccatgctggtgtgctgcacccactaacgtgtcatctagcattaggtatatctcccaatgctatccctcccccctcccccgaccccaccacagtccccagagtgtgatattccccttcctgtgtccatgtgatctcattgtgggttcttttgcttagcataatgatttcaagttccatgcacattatagtattagaccgttttcttgttactaccagatacattccattgtagcacattttgtttatccattaatcagctgatagactttgggttgttccactatttgactaatataaataatgatgctgtaaatatttatgtgattttgaatggacctggttttcaattctcttaagtgtaaaactatgagtggaattactggccacactgtttccaattatatttcattattttcaaaactcctaaaatcagtagtgtctctgatgtgatcataatactggatcaagaaaattgtaccacttgacatccccaccagcagtatatgaaaattccagtttctgcatgttactactaaaactttgtgtctatttttttttaattaaaatcatactagtgagtgtgagctggtggctttgatttgcatttccctgatgattaataatgttaagtatcttcacatgtaattatttgccatttgtatattttctaatgtttccatttttaattggattatttatctttttcggttgtgagtgttttaaaaataattttatgttctggatacatgtagatataggatttacaaatatttactctcattttgtggattaccttttcattttcttcaaagtatcctttgtcatgtaaagttttatattttgatgaagttcagttgatctatttttacttttgctatagtttttttcttattttacctagcaaacaattgtctgacccaagattataaagatacactcctatgttttcctttggacttttataattttctttcttactattaggtaaagggtctattctgagtatatttttgtatttttgtgattgtgtgaagaacaaatataaacgtatttattttttaaattgtggatatccagagagcccagcatcatattttcaaaagtcttttcttctctcctttgaattgtcctggaaatcctgttgaaaatcaaattatataatacatgtgagggtttatttctggatactcattcccattccattgatctatatctctatttttataaagctatgttaatattttcatgcttatgccagcactgtactgccttgattattgttccttggtagtaagttttgaaattaggaaatgtgaacctccaactttgttcttctttgttaggattgtttctgacagtcctgggttcctggaacatccataaaattttagaattagcttgtcaatttctgcaaataaatcagctgggattttgatagacattgtattgaatctgtagatcaatttgagaattatccatttcataatattaagaatttattaaattttaactgtattgccttcaatccatgaacatggactgtctttctatttatttagttcttccatttatttagttatttcattttcattaacaatgatatataggtttcagagttttgcatttctcttaatgaaattattctcagggtttttattcttcagtttaactcctataaatagaattatttccttaattttagtttttagaatgttaattgcaaacatatataaatacaattggcttttgcttattgatctcgtatcctgccacattgccaaactcatttattagttcaaataattttaacagatttcttaaaattttctaagtacaggatcatgttatctgcaaatagagataattttacttctgaatgtcctatctagatgagttttagttcttttttcctcctaatattcctttgataggcacacccagtaaaatgttaaatggaagtggcaagaataaacgtatttgtcccattcttgattttagcagaaaaacactcagactttcttcctatgtatattgtttactatggattttccacagataacttttatcagattgaggaagttctgttttatacctagtttgatggacatttttatcatgaaaggctgttggattttatctaatgctttttctgcatctcttgaggtgatcatatgattttgtcttttatttactgcatatggggtggggtattggataaattcctttcagatgttaaaccaaccttgaatttctggtataaatcccacttaaatatggtgtataattttttagaaatgttgatggatttgattggcttgtatttggtttagcattttgcatctatattcatgagggatattatcttgtagttttcttgtggtgtctgatctgtgtcagggtaatatttgtcccatagaataagttggaaattatttcctcttgatgtttttagaagagtttgtgaagaatttgtattcattattatttaaatatttggcagaattcactagaaactactatttcatttctgtgtttgctggatatacattcagattatgtattttttattcaattttgtttatgtttttctaggaatgtgtcaatttcatttaagttatataattttcccaaagctctttcacaccgcactttctttgacttattacttccttcctctctacaaagagcagcacaacttccccatagtatgtggaaaagaaacacaatcaggaggagagagagaattagttggcaaacagctccaaattttgctcgaaaaagacaaggaaaaatagaatttctggttttaaaattttaacatatgacctgagcaggtcccaaaagtcgttatttagtggaagttatttttttgttgttgtttgccttgtaatgaggaaacacttttattgtctttcttaacctctagtgatggatagataggtgtgactgaccataaacaaacatactctcaacttgtgattgcacacaggtggcctgagtgtcatggaggagttttgactggtatgcagttttctggtccatactgggttaaaatagattaatttaaatatttgacaattaggtagttttcacttaaaaactaagagaacttttcaaacacttacctttctggcaacttcgactgccagaaatcagctcagaagtgagcaacttctttcctcttagatggtgccctcaatttctaattcaacagaattcctaggatttctgattgtgcttgttcctgagcctaatatttattgttgtgttccttacaccttgtagaaaaatgggtttaggaataaacataaacatttcttgtgacttcatctaaatcaaaagtgggaaagtaaaatgtagatatgcttatgctgccacaaacattgtgtgtatctatatatctacatatagacatacacatatgtgtatctacatctacatatatatgtatatgtgtgtatatattggtggaaaccagtttagctttgctgatttatattgcttgtatttgagttacccagtttttttttttttttttttttttttttttttactaccactaggtattgatgaaagcaacacaagaaagacattttggagatgctggggtacctaaaattttcctctattaacatgagggttgctctgtagcagtgaatgaacaaaaggagcaaagtttgaaaactgtctgattccttctgtttcattgttcattttatttaatattaataatgtaaaacatcaacaaagccaaaactattggataagatgcctaaggttgtcaagtgagactttttttctgttttgccaatactagtaccctatgtgtgtctggtcatcaactcagcagcacttcgttctgtgtctgccttgttccaggcactgttctggattccactctacaggtacacaaggtctcttactcactgtaccttttatttttttggtggaatgggaagaagtcaaagaaataagcaagttcacaaataaacagaataattttataaaatgttaaggggtatgtaggatatagagcagaaggatatgagaacatgtactgggggcgtgacaagctctaggttaagctgggtgccctctctaagcacgtggcttatgaacagaagcctggatgtcagccatgagccagccatgaggacgtgtagggaaggacatggtgaacatgtgtcagggctgagaatggaccatgatttccagactgttgacagtgacttgacatgcagaaaatgaagtgagagatgtaggattgtgcagataatggcaatggatttgaattgcattctgtctgtggtgagagcaattggtaggttttcaacaggaaagtagcatgatctgatcttcattaaagacttcaatctgactgtgctgtgggacacagaatgtcaggatgggagctgtggcaggagtgtgggcgaggtggccatgacagagacagaactagattgagacctccccatcactcacctcagcagttcttgcatttctacatagtgtggtctggcaggcctgccctgtctagctctgccaaacatagacccccctctggggctgagtggggagcccaggccaccgggcattccagagaccagcctgttgcctgaagcaccagagagcttctcttggtaaacaaagattaaacataaacccttctgctaccaccacaactggcccttacctgcatgaatcacctactagcctagagctggaactacacaacccattacaaaacctgttgacacaagcgaacagcacaaagaagcatgatgagattcttgagacctccgccactctgtctctgcaagaggctgttagcctactcacctgaccagtacatcactcctacacccagcatttgagaaagccatcatacaaaggctatctatagccaaggagttcacgcagaatctttgccattgaaggcacctaaaaagccagatgactctacacaacatacattatagtcacatcctcaagggtgaaaaaattcatccaaatgaaagtaaattcaaaaataacaagaaggcatagtttatctagttgagaaggaaccagaaattctggaagtatgaacagagtattacagcagcccccaaatatcacactaattctctagcagtatatcctaaccaaaatgaaaacatggaaatacagatagagaatacaaactattgattctagagaaacttgttgagtttcaagagaaagttgaaaaacaacagaaagaaatcggaaaaaaatcaaattaggacatgaaggaaaaatttaccaaagagatagatattaaaagaagcaaataaacagaacttctaagaatgaaaaattcactgaaggaattacaaaatactgttgaaggcagtaacaatagactagaccaagcagaagaaagaatctcaagagtttgaagatcagtctttcaaattaactcaagcataaaaaaaaaatttaaggcctttaaagagtatgggattatgtaaaatatccacacctacaattcataggtattcctgaggaagaagaaaaagtaaaagtttggaaaacatatctgaggaaataattgaaaataaattccctcatcttgctggagatttagacctccagatataagaggcccagagaactctagaaagatacattgcaaaatggacttcaacaagacctataattattacactatccaaagacaatgtgaagaaaaaaactttgaatcatcaagacaaaagcatctgattacctgtaaaggagagtccatcaaatttctaagcctatcaatggacttataaagagaaacctcacaaaccagaagagactagggttctactttcaggcttcttaatgataaaaactgtcaaccacaaattttatatcttgctacactaagcttcataaatgagggagaagtatagtatttcccagacaagaaaacactaaagtaattttcaccaagagactggccctgcaacaaatggagagttctaaacgtggaaacaaaatgttgataccataataaaagcatacaaaagtagaaaactcacaggtcttataaaacaattatgcaaatgagactacaaagcaactagggaacaattaacattatgacaggaacaacacctcacatatcaatattaactttgaacataaatggatgacatgtttcacttaaatgatgcagattggctaaattgatttaaaacaacaacaacattattcaaccatatgctgcttacaagaaacccacctgagtggtaagacattagtaggctcaaggtaaaaatgtggaaaaaatattccatgcaaaggacaccaaaaacaatgatgagtagttacactaatatcagataaaacaggctttaaatatacaaccataaaatgacaaggaagttcgttatataatgataaaggtatcaattccacaggaagctataacaatcataaatatacatgccccaacactggatcacctagattcataaaacaaatagtagtagaactaagaaaatagcaatacaataatagtgggggacttcaataccctactgagagaactagacaaatcattgagattgaaaatcaactaaaaattagcggactaaaatttgtggaccagatggacataacaaacacattgcattctactcaacaactgcagattatatactcttctcttcagtgcatagaacattttccaagacagacaacatataaggtcgcaaaacaagtctaagtaaattttcaacaatcaaaattatataaagtactttactttctcagaccatagtggaataaaactagaaatcaattccaagagaaactccccaaactatacaaatatatggaaataaaacaacctggtcctgaatgatcgtggggtgaaaaatgctattaagatggaaaatttttaaattttctttacctgaatgaaaatggagctacaacataccaaaatatctgggatacagaaaaataagtgctgaaatgaagctttatagcattaaatttctgcatgaaaaaatagaaatattacaaattaacaacctaacattgcacatcaaggaaccaggaaaagaagaacaaaccaaacccaaagctaacagaagaaaataaataaagataaaagcaaaaccaaataaaattgagaccaaaaaaatcatacaaagcatcatcaaaacaaaaagttgtttctttgaaaggataaattaaattaatagaccactagctatattgaccaagaaaaaagataagatttaaacaatcagaaatgataaatatgacactacaactgatatcacagaaatacaaaagatcctcagagactactgtgaacatttctgttcacacagactagaaaacctagaggaaatacataaattcttggaaatatacaacctctcaatattgaaccaggaagaaatagaaatcctgaacaacccaataacttattaagttgaataaatgatttaaaattctaaccaaaacaagtccaggatcagacagtttcacagataaattatactagatgtacaaagaagaactggtaccaatcttactgaaactattttaaaaaatgaggaggaaggactcatttctcactcattctatgaaaccagtatcatcatgataaaaaaaacctagcaagaacacaacaaaaaagaaagctacaggcaaatatcatagatgaacatagatgcaaaatcctcaagaaagtactagcaaataaaatccagcagcatgtcaaaaatgtgatcaaaattttatcatgatcagatgagttttaactccagaaatgcaatgaaggtatatgcaaatcaacaaatgtgattcgccacgtaaacaaaaagtaaaaaccaaaaacatataatcatctcaatagatgcagaagaagcattcaataaattccaacatcccttcataataaaaccctgaacaagctaggtattgaaggaacatacataaaaataataagagccatgtatgagaaatgcacagtcaacatcatactgaatggacaaacaccaaaaacatgctcctaagagctggaacaagatgaagatgttcactctcacctctcctattcaacatagtactgaaagttttagccagatcagtcagtaaagagaaagacataaaagacatcccaattggaaaagaggatgtcaaattatctctgtttgctgatgatgtgatcttatacctagaaaatcctcaagactctttcaaaagactcctatatttgagaaatgaattcaataaagtttcaagataaaaataaatgtacaaaaatcagtagcatttttatacaacaataatgatcaagctgagaaccaattcaggaagtcaattccatgtacaatagctacaataagtaaaatacctaggattatatttaaccaaggaggtaaaagaattctacaagaaaaactatgaagcactgatgaaagaaatcttagatgaaacaaacaaatggaaaaacctccctggctcatggattgaaaaaaatcaatattattaaaataaccatactacccaaagcaatctagagattcagtgcaattctcaccaaaatattaatatcattttttaaaagattagaaaaaaagtcctaaaatccatgtggaactaaaaaagaggctgaatagccaagcagttctaagtaaaaagaacaaagctggaggtatcacattacctgacttcaaattatactacaaggctatattaaccaaaagagcatggtcctgatataaaaatagacatgtagatcaaggaacagaatagagaacccagacataaagccacatacatacaggcaactgatcttttacaaagttgatgaaaacacacactaatgtaaggataccctatccaaaaatggtgctgggaaaattggatagccatatgcagaagaattcagctggatccatagctctcaccatatacgaaagttaactcaaaataagttaaaaatttaaatataacacctgaaactataaaaaaaccagaagaaaatctaggaaaatctcttctggacattgccatgatcaaataatttattactaagacctcaaaagcaaatggaaaacatcccaaaaatagacaaattgaactaaaatgcttctgcacagtgaaagacaaaattgacatagtgaacagacaacttatagaatgggggaaaatatttgcaaactgcatttagtgagtaactaatatccagaatctacaaggaatgcaaaaaactcaataacaaaagcaaccacttaaaagtaggcaaaagtaggcaaaagacatgaacatatatttttcaaaagacaaacaaatggttacaagcatttgaattaatgctgaacgacactgatcatcacagaaatgcaaattaaaaccacaatgagataccgccttataccagtcagaatagctattattaaaaattaaaaacagatgtgtatgaggatgtggagaaaatacttatctatggttggttgaaatataaatagaacaacctctatgaaaaagggtatgaatatttctcaaaaaaaaaaaaaacctaaaaataaaactgccattcaatccagcaatcccataaaggatatatacccaaagggaaaaaaattatatcattatatcaaaaagatagttgtatgtttactgtggcactattcacagtagcaaatatctagaatcaatgtgttcttcaatgaatgaatgactaggtaaagaaaatgttatatatatatatatatttatatagtcacccataaaaaagaatacaatcttgtctttttcagcaacatggatggaagtggaggtcattatcttaaacgaattaactcagaaacagccaaatcctgcatgtccctgcatgtttccacttccaagtgagagctgaataaagtgtacacacaaccatagtagaataatagacctggagactcagaaagtggggagggtggtaagagatgagaaattacctcatgggcacaatgtaaactctctggctgatagctacactaaaagcctgcatgcaccactacatggtatatccatgtaacaaaactgcacacgtaccccctaaatctataaaaataattcaaaaagaaaaaaataatggatttgcacgagtatatgaatctattatgggaggatgacagtgtatagtcaagagtgtggcctggaattgggtaaggtgagggacggaggtttgcaaagtgcatgtctgggtgacacaagccagtggcatcagctcaggcatcagcggtgtcagcccccaaactctggacccagttggaggcttccataattaacagggagcatcaaacatattaaccaagcattcatcatgtctagacttcattacatatgacattatgatttctattgtattggagtctagagagaggcccaggatttctgtacacatttggacaggcttccttccttctgtcttaccttgggtgcatttgcctggcaggtgagaatggttaggcagccaagtgtttctgtgagaacctgttccagtgatgtcctaagcagctatgagtttcggaaggagctgctgtgacgatctattaatagatggtccctaatatgatgcacttttaagcatcactcgtgtagctacttgctattatttcattttgaaatctttattacttcagattacacttatgtaacattgttgaaacatcatattttctttgtacataaactttttgttatttctcaaagaagtaattgtaatttgctaggcttctcccctttattccttaatgtgtactgtattctggggcttctgaaatccccatgcaaactgaatgcttaatttaatacctgtcatgacctgaattacttcatttgggaagagagctattacaaagcagctgtgataaaaggagaatttgccaaatatttatacctatacagaatcccctaaactgtgcaacctatttggttttaattctataaaagaagttataccatgttttattcttaatgatagtgcctgacatgactgtcctgtgacaaaaactaaatcattagtccctgtaacaggaagtctatattcataaaactcttacaagataacacaggaaaagcctggtttatgttggatatgatgatgacttttgatatgacatcaaaagtacaatccatgaaagaaataactgctaatttaaaattgaagacttctgctctgcaaaagacattgttaagataatgaaaagacaagccaaagacttgtagaaagtatttgaaaaataatctctgataaatggcttgtacacaggatatacaaagaactaaaactcaactacaaaaccttgaagaacccattaaaacttgggcaaaacgcttgaacagacacctcatgtagatctgcagatggcagataagcatatgaggatgctcaatgtcacatgtcagggaattgcaaattacagccgcaatgagacaaccctacaccactgttagctggctaaaatccaaaacgctgacagcaccagatgctggcaaggatgtggagcgatggggactctccttcgttgtgggtgtgaatgcaagtatggtgaagtcattttggaagacagtttggtggtttcttactttgctaaacatattcttaacatagaacctagcagttgtgctctctggactttacccaaatgaattgaaaacttatgtacccacacaaaaaacatgcagagatgttaacaaaagcattatttatttgtttattttataattatgtataattgtcaaaaactggaagcaaccaagatgtccttcagaaggtgaatggagaaataaactatggttcatccagtcactgtaatgttattcaacagtaaaaagaaatgaactatcaagccacaaaaaaatggaggaaatttacatgcaaattactaagaaagaagtcaatctgaaaaggctgcagactgcatgatgccaactgtatgacctgttggaaaaggcagaactctagagacagtaaagagatcatggattgtggggcgggaggggtgaacaggtggagcaccgaggatgttcagggcagtgaaactgagttgtatgatcctgtagtggtggacaggtgtcattatctgtctgtccaaatccacagaatgcacaacacctggagtgaaccttggtgtaaaccatgactctgggtgacgaggacatgtccacgtaggttcaccaatgataacaaatgcgccacctgggggatgttgataatgaaggggctgtgcacatgtgggggcggtgggggtacgtgaattctctgtaccgtcctcgtcctctcagtttctctgtgaagctaaaacccctctaagaatgaaatctattttaaaatattaacgttggagctgggcacagtggctcacacctgtaatcccagcactttgggaggctgaggcgggtggatcgcctgaggtcaggagtttgagaccactctgaccaacatggagaaacctcgtctccactaacagtacaaaaattagccaggcgtggtgacatgtgcctatagtcccagctactcaggaggctgaggcaggggaattgcttgaagctgggaggcggaggttgcagtgagccgagattgcaccattgcactccagcctgggcgacagagcaagactctgcctcaaaatatatatatatatatatatatatatatatatatatatatatatatatatatatatatatatatatataaacgttgacattgctcttgagactttatttttatattatttaaacattggatgaaaaattttacatgccaactgaattatatggaggaagccaagataaataattagcaatatagtcttcagggacatatgagcagagtatttgaaaactctggaaattggaaatcatcattctcagtaaactattgcaagaacaaaaaaccaaacaccgcatattctcactcataggtgggaattgaacaatgagatcacatggacacaggaaggggaatatcacactctggggactgtggtggggtggggggagggatagcattgggagatatacctaatgctagatgacaagttagtgggtgcagcgcactagcatggcacatgtatacatatgtaactaacctgcacaatgtgcacatgtaccttaaaacttaaggtataattaaaaaaaagaaaaaaaatgcattgattatatacatattagtgaatataacctataaaatattaaccagatattaaataaagtagaatttcaaaaaaaaaagaaaattctattaatacgtatttggatgctaatcttgtgttttggtgaaaaattccttttttattttgagtggacctcagtatcatcatttacttagagaatttaccgttgtctacttttagttatacttttctgtatagacttggcccgccacatccgtgggttcaaccaactgtggatggaatgcatttgaatagaaaatgtgtctgtacttatgtatagactttttccttgtcattattccctaaataatatattgtaacagtgttgttatggcatttacattgtggtagatagaagtaatctggagatgatttagagtatgagggagggccaggcgcggtggctcacgcctgtaatgtcagcagtttgggaggctgagatgggtggatcacctgaggtcagaagatcgagaccagcctgaccatcatggtgaaacaaacaccctttctactaaaagtacaatattagccaggcatggtgacacatgcctgtaatcccagctactagagaggctgaggcaggagaatcgcttgaacctgggaagtgaaagtttcagtgagccgagattgtgccactgcaccccagcctgggcaacagagcgaaactccatctcaaataaataaataaataaataaataaataaatgtgtatatatatatgtatgtataggggaggaggtgcatgggttttttgcaaatactgcaccattttatatcagggacttgagtatgtgtgggtttgggtatctggggaggtcctggaatccatcccccacagatcccaaaggacactgcatgactctcacacacaccctagtgagaaggacattagacaggcgacctgagttctatgttttggccaattcctgacccacacgatcctaggccatcataaatcacgtctctaaacttgttacctcatcggtggagacacctgggtgttgccaagagaagtagcaaaggttttggtgtttgatggactcacatttagacctgacttgccctttccagctgaggatgttgggcaggaaacaaaacttccctgagcctcagtttccacagtaaaaatggcattaattatatgtgttacacattgttgtgaagattgaagatgatgtctttaaatcacccaccacaaggcatagtagacaaggtgagcaaggaattttctgagtaaatgtagcattacctcctaagactgcttctcttaaacgatttcctaaaaatcatcatagaatgatgtactatatgggagagcactcagtaagcgttcaggtctatagaaaaagatgcacatcccttgtattgagttataaactcagtggacaatataccttagaaggttttgttttgttatgtttttggtttattttttgaggcagactctcactcgatgtcacccaggctggagtgcagtggtgcgatctcggctcactgcaacctccaccccctgcctcagcttcctgaatagctgggattacagatgactgccactgcacctggttaattttataatttttagtagagacggggtttcaccatcttggccaggctggtattgaactcttgacattgtgatccacctgccttggcctcccaaagtgctgggattacaggtgtgagccacaacacccgaccaggtttttattttgtggggggcttgttatttcttggccttactgatcttggcatttatttaaaaggcttgataataacttatattgaagacactgttttacacacacaaatagtactcgttttctatttttctgttctatatctttctctgaaagtagttgatctgtgtttctgtaaacaaacttaattctctttagttaggggacatttcgaatgtgtgtttgtaacactcaccatttataagcagattccagtaattttacatctattttatttcacatgagcaaactagtattacttatctccattcttgactatttttagtgcttcacaaaattatagtcatttctataatagctttatcactttttttgagatgcgcaaaaaagggatgttcaggtaaccatcacatgacaatcatcacataccagtatttggccttcttactgtgaacattttccatttaaaaaacaaagtgtactgcattaaaacatgcatgaatttcagactaaatgcctgcttatctacgtcatcaaaccgtttttattatttatatgtattaacattacagaaacctgtaatgtcgtagaactaatgataggtgacataaatatttattgatgttttagttatagttttcattttagaaaaaaatacagtaatgtaaaagggcatctggtttggagtagatttggatagtaattagtatttttgcttttccataaaaataaatacaagtttataagttacatatattttaaattgttattaaactcaggtttcccaggttttgtgctcagtgttcatttcagttctttctgaaaggccctaggttacctaattttgcatttgacagaaagtgctgtttcaaattactgaattttggtattgcaggaaagacctgtatggcaacctgaaattgcttgtacataattgcctttcaaattatagcccattagaaagaaatgcacctttttttagagcacctaggaaaatattttctagagaaactcctggtatcaaaatccctaaagctgtgtgagcagctggctctaaaggcagtcacgtctggtcctggatcgtgtgtatggcagccacacctgtgtccccgggaagacatgctggttctgatactggtgtgggtcgtgtgtatggcagccacacctgtgtccccaggaagacatgctggttctgatactggtgggtcgtgtgtatggcagccacacctgtgtccccaggaagactgctggttctgatactggtgtgggtcgtgtgtatggcagccacacctgtgtccccaggaagacatgctggttctgatactggtgggtcgtgtgtatggcagccacacctgtgtccccaggaagacatgctggttctgatactggtgggtcgtgtgtatggcagccacacctgtgtccccaggaagacatgctggttctgatactggtgggtcgtgtgtatggcagccacacctgtgtccccaggaagactgctggttctgatactggtgtgggttgtgtgtatggcagccacacccatgtccccaggaagactgctggttctgatactggtgggtcgtgtgtatggcagccacacctgtgtccccaggaagactgctggttctgatactggtgtgggtcgtgtgtatggcagccacacctgtgccacatcaggaagacatgctgcttctgatactggtgaatctcccaaccacgtggaaccacgtgaattctctcctcattttccctttcctgatctcagatttatgatagggaatgagatcttcccttccctatgttcctattgcccccatctctcttctcatcctttcatttgtaaacgaatcagaagtcctgacttgtggaagagatgcaagattctccatgtgtgctactgatgtgcctgatcaagttaagtcaccgtttgggggaaggagcagtacttttgctggtatcatttacatttgtactaacaggtgagatattatcagaacacactctattattattatcagaggtgtctgataatgagatctttataatatgtgattcaaaggggtatgaacacactagatggagcttatgagatgtcagaaggagaggtaatgggatgtccacggggtgagttgaatgtggcgtgagcacttaggggctcactaaagatgggacccagaactcaggctgcaaaaatgaaggataaagagtgaagcttctacagtaaaagtcaacctacttgcatttactgagggaatagataacataaataagttgtatatgccaagactggacctggtctagctgggtgtgaaccacaaatgcagaattgtggctgttgtaaataaagggaaaggagaccccgacaatcagcctcatgagcgtggtgtgtgggattctgaatgaatctgtccctctggtcaaaatcactcaagcatttatctgagcattttgcttgtaggcatcagagccagactataattagagaagttggaatacggccaacaggatgccacaggaaaaattaaatgcttgcaaaacacacattgcaagaaacagagtctcttttcattggaagagtgaacagtcacactttttttcagatggtgcttggttgtgggagaaaggattgttagaacgtgattgaaagcctgtccaaggccctatacgcagggctcttcacctttgtctctgctgctcccggagccattgctgacagggctatgaatgacagccgtgctcagtggcttgaccccaggcagggcccaagggaggggctccctcccaggctgagtccagagcacttcaagctagaatgcagaaagggaagcacttactgtgtaggccctagagtcttccgactctggacagaaaatagaaaagtggaactgagttaactttacagcaagatgcaatggtgtgtttgtgaatggaaaagtagaactgagctaactttataagatgcaatggtgtgttcatggaaatgttccatctcagaggcctttctcagtgctctgataggttttcttttagtttattgaacggaagacagatttagttataaaaacatgatcagcaagtatgagctctgtctgcctcactgtatctgaagtcccaagaagccaccattctgatctaatctctaacgtggcacggggtgactgagggccaggtgggagcagggcggagccacataggcaacacacttgcgtctgagcactttctcagctgctaggtccaatttctggttacacagataagctttggtgaaagaatagaacaattcaagacatgccttttagtacataaatacaattgaccattctcctttaactgttaaaaatcccactaaataaatatgataacaccatcagtacacatataatttattaagtacaaatgtggagacaagtttcagaaacaatctttgatgaatgagccatgattcagatttttaaatcataccgtatttgcattttagttctattgttttttctttttggttgctggtggccatgtcttgtgagcagcataaaaaactgtgattgtgatgttgctatttctgaccttgaggaaagtttcaaatatatttaattttctgtgtattaatataaattaatataattgcaggctttttttgttgacatgacttcagatttcatatgaggtctgaaaatctggtagtatgcatgaagtatcattttcattggactttaatcaattactgaagagataaatgcttattatcaactaaaaaacacatttaaaaaacacattttaattattagtagatgcgtattagtaattgtagacctagctgtagtgaaactctgcattacactcattaggaaaaattgtgaagtccacttgtatataggcatgcatttcttcatatgtattttatattctctgagaaaccgaatatagacaaagatggcatatttcaaatattgacttagaaactttcttttccccagtgaataccaaacagttagattcctggatcttcctctaaatcaagcaatctctaaatcataagcaaatttcattgctattgagataataatctgcctcctcttctccctgacaatcaatacgagcaacgatcacagtggtcccagtggagaagccgtgacaacactaagcgtggggaactgtcaaggctgtcatgtatgggatgcctacattgccagggacttgccatggagcttccattagatccacaaaacaacatcttgaaataacgttgttcatctctgtttctatttcatgagttctctcatcctcggtgcaagtggacatgtccctgtgtgggaggccagcgatgagcagagcctggcacagtccctgcccccttagaacctacagctgggtgggtgggtaatgaaacctgcaggcttaatcgatagtcacacagaaaaggggcggcagcgacttggggggtctggagagggatttattcataaaggcagagagaagggtgatctagaaagggatttatatgggcagagagaagggtggtctggagaaggatttataagggcagagagaagggtggtctggaaagggatttataaggacagagagaagggtggtctgtagagggatttataagggcagagagaagggtggtctggagaaggatttatatgggcagagagaagggtggtctgtagagggatttataaggacagagagaagggtggtctggagaaggatttatatgggcagagagaagggtggtctgtagagggatttataagggcagagagaagggtggtctggagaaggatttatatgggcagagagaagagtggtctgtagagggatttataagggcagagagaagggtggtctggagaaggatttatatgggcagagagaagggtggtctgtagagggatttataagggcagagagaagggtggtctgtagagggatttatatgggcagagagaagggtggtctggagagggatttatatgggcagagagaagggtggtctggagagggatttatatgggcagagagaagggtggtctgtagagggatttataagggcagagagaagggtggtctggagagggatttatatgggcagagagaagggtggtctggagagggatttatatgggcagagagaagggtggtctgtagagggatttataagggcagagagaagggtggtctgtagagggatttataagggcagagagaagggtggtctggagagggatttatatgggcagagagaagggtggtctgtagagggatttataagggcagagagaagggtggtctggagagggatttatatgggcagagagaagggtggtctggagagggatttatatgggcagagagaagggtggtctggagagggatttatatgggcagagagaagggtggtctgtagagggatttataagggcagagagaagggtggtctgtagagggatttataagggcagagagaagggtggtctggagagggatttatatgggcagagagaagggtggtctgtagagggatttataagggcagagagaagggtggtctgtagagggatttatatgggcagagagaagggtggtctggagaaggatttatatgggcagagagaagggtggtctgtagagggatttatatgggcagagagaagggtggtctggagagggatttatatgggcagagagaagggtggtctgtagagggatttataagggcagagagaagggtggtctggagagggatttatatgggcagagagaagggtggtctggagagggatttataagggcagagagaagggtggtctggagagggatttatatgggcagagagaagggtggtctggagaaggatttatatgggcagagagaagggtggtctgtagagggatttatatgggcagagagaagggtggtctggagagggatttatatgggcagagagaagggtggtctgtagagggatttatatgggcagagagaagggtggtctggagaaggatttatatgggcagagagaagggtggtctggagagggatttatatgggcagagagaagggtggtctggagaaggatctatatgggcagagagaagggtggtctgtagagggatttatatgggcagagagaagggtggtctggagaaggatttatatgggcagagagaagggtggtctgtagagggatttatatgggcagagagaagggtggtctggagaaggatttatatgggcagagagaagggtggtctgtagagggatttatatgggcagagagaagggtggtctggagagggatttataaggacagagagaagggtggtctggaaagtgatttacaagggtagagagaagggtgctctggagagggatttatatgggcagagagaagggtggtctgtagagggatttataaggacagagagaagggtggtctggagagggatttatatgggcagaaagaagggtggtctggagaaggatttatatgggcagagagaagggtggtctggagaaggatttatatgggcagagagaagggtggtctggagagggatttataaggacagagagaagggtggtctgtagagggatttatatgggcagagagaagggtggtctgtagagggatttatatgggcagagagaagggtggtctgtaggggaatttatatgggcagagagagaagggtggtctggagaaggatttataagagcagagagaagggtggtctggagaaggatttataagggtggagagacatggaatttgcctcgctggctgcatcagcatgaatctcgaggtttggtgcttgtgatgcagttgaggggaggggtgggagttgaggagatggagaactggctagaacccgaggggcagccttgaggggtggagggggagcctgaggaagccgggggccccgggagggggctgggctgcatgtggctgggtagggctgcatctctgtcctaagaaggagtgaaaacccttgggtggtggacagcgcggggctgagacgcaggcgggaaaccttgggatgtgcattttgaaaaactgagttgccaggtggagaagagactggagcgggagcaggtatcctggtcccgcaggcttgtccgaggtagagatgtgggcagctgggaccatgttggtggctgttcagatgcaaagaagtaaatggattcaagagcctcaaatggattcaatgtctagttaaaggcttgatagaagggatttttagatgccattaaaaatgacagtcttaatcagattaaaaatttggccacattaaaataaaatatccacacatatatattatttttcaaaaacacaccataaaccaagttaactgacagaatacaagctggaaggacgtgtgttctatttatgtgacttacaagaggtttatttctgtattaaatgaagattttaaaaacaataaggcagtgtcataaaaggaaaaaaatcccgtggtacagacagacagtccagcaggtggaaacctttaaggccagtaaacgtggatgatgtccaagttcacttgtgattggagaaatataaatttccatcaatggggatgtcttcttcccagctaggagactgaaaaataaaacgtgttaaacccaaatgttgcctagtttagtggattgccagaaactcacatgcaggtttgtaaatcattacaaatgtctatgaggatcagttctctagaagaattgaagacgcgcctttgggtgcagagttgcatatctgggtgccctagaaattccttcgctcccagcaggatgtcccagcatcatctgtatctgctgccctgcaagacaaaagacttgcagatggcccatgcagcagatagtccatgtttataaatggtcagtattacttgtaacaggaaataaaaatggaaatagctgaaatagaatactgtaggggattatcttaatacactgtatacatgtgttatgctttgttaatttcatgcaatgaaatattacattactgttaaaatggattaattggggctatctccatcaacatatctaaatatgttacagctttgagaaaggcagttatagagcacagtatatagtatgacccccttcctgtaattaaaaaaaaaagtgtataactgttgtcaacaagtaatcccatgtttcattaatttgcagacaacttttttttgttttgttttttgttttgcgacggagtctcgctctgtcacccaggctggagttcagtggcgtgatcttggctcactgcagcctctgcctcccaggttccagccattctcctgcctcagcctcctgggtagctgagattacaggcgcatgccacgtgcctggctaatttttgtatttttagtagagatggggttttaccatgttggccaggttggcctcaaactcctgatctcaggtgatccgcccgcctcagcctcccaaagtgcagggattacaggcgtgagccaccacgcccggccgacaactttatttcttataaagagttgcagccctcaggctggactttctgacaggctgcctccagcagagaccgaaagcaggcatttgaaggaggaaggctgagacaggaatttatgctgaacaggttggccaaatatacatatttagcaggtgggagatggagctatgcgtattcacggactggctctgagacatttgactgaataaacacgtatgttatgtgtgacacatattcactttggggtgtggacttaacattaaaatgtagcaaaattaggctctgtgtgttgaaaggtgaagctggtacatgaatgccctcagtgcacagcctctgcaaaaccagccaggaccagatcatggtgggtggtctcttatcaggagaaaattactggaatcataccttatccaactgaagctgctgctgtggctggtaagaggttcagttggccagggtctcagagctggatgagctatgagtattttaatctttcttatctctaggctagtgctggttcagctgctacagaaaaagaaaatcttgtggcagtgagtatacggtttactaagagcagggtgcacaactcaccctttgcctggcatggctttaggtcctgtttgtaatttggtgtcttattgccacagagaatctactctgtcagtcttatgatctctgttttactgctgtaacatctagtattaattattctgtaactgtgtcataaaagtctaaaaacttcattagaaaatgaaattgactctgtaaagcaaaaggtatgtaataaggggaattctcaagtatatctttttaaaattatatacacacatgcagacacacgtatacacacatacacatgcaggcatgcagacacatggagctacgtgtacacatgcagacacatgcaatgtgcatgcacaaacatgcaaacaaatgcacatgcatgcacacatgtagagacacatacgtgcacattcacacccagaatatatgcatatccacacaggcagggacacacacacacatacacacatgcacacacacatgtatgtacatgtatttatggtgtaggttaaaattgtataaagctggcattgaatatacagatgcacaccatagtgttaaattttgcctaagagctcacgtatacataaattttaaaaagaagagttaccgtatcttcttttaatttacttggtttctgatcacagataagcattgctagacagctctgtgactgtgtcaggtgaatgttaaagggttgtcgtgagggcagtgttagctatggaatgcatcaataactgtcaggttccgagcacacagtgggtgttctacaaatgcggatggtgtgaggaggtgacctgtggtgtctggtcagctcataacttccatatttttctttaggctcttccccttcagagagtgccccacgccatctccagttgggtttcgtccatcccttttcctccaggccctttcagaatttcgtgcatgtatctggcatccatgcataagaaatgtaaagatatttgttagtcatggagttagttagcaaaatatgtatgttgtagtatggtaacgagcctctgttgactcccactttttactggtagggataaaatttgaaaatgattaattcacagttcttttaaaaatcccattaaggctggctgattgctgaagtggctcttacgttctgttcagtgcatcaaagcaagggaaacatcatcttgcagaaagtagtgaggagacaagcagccctggggagctgaaggcacgtcgctggtggtcagagggtgtcttcatttactggccacaatcggcataagctgctgcttctgaaagatgcccttgaaatttggtgcccactcctgagaccatggtgggccctccaggaatccctgctttagtgttcacttatttgtggcaaaagatggggccttggtgcccacagccgactgggtaggtggaggctgtgcagtcagggaggggagagtgcatggtgggcagggttggggccgctgtcagacctggagaaacatcagtgagaaagtttggaaaaggaggaaggagcaggaatgagagctgtttagacccagggcgtgaacttctcacctggttcaggctgtgctctgcagggaaatattcacagcatgaacgatatgcaaagccaatgcatgctcaagtggctggcaaaaaaaaattaataataataataaaataaaaagattgcgtgatttttttgtaaaatgttggcaaaggcctgagcacaacgtgctttcacttaatgggccatcacattacagcccctgttggctctcagcagggttggctcccagcaggtgttttctgagtgctgctgggcctgggatgctggtagtttccagggtgtgaagagatgcccattgtcctcctcctgtcctgacaggtttcccacttgatgagaatacagcacgcatgcagagctctatctacagtgctgacagcgctgcatgttttactagaaggacctggcatcagctcttcgagcaggtgctgttaggggggcagctgtggagggtgtgagttgtggacaggcattctgagctgggctgcagagcactgatggagggacgtcatggtgtgtattgtgcatcaaacagtcccctttggctcagcttcatgtgatgggcaatgaggttgaaatcagacaggccagatatcatgtctgtgagtcttggagggtcttggagaacatgctaagaagttttcattttaatccatcaatgagtgtgtttagagcaagagagggactagtgattccaaactggcgtttcctgattcacgtggcaatgtcatgcagggttgagtgggaaggggacaaactggagctgtttagaagatggctttgtgaatctgagtgagtgttgtgggaagaggccataggtgtgctgggaatgtggagggagtgaccaggtgtggtatccaagggaagaaatggcaaggagggcagggtcaaagtggctccaagctttggagattgcacactcttctggaaagaaaggaaatggaaattcattgaaaaactataatgtcacagcaggctgttgaaactctacagacattctctaagttaatgatagttccactggtaattatgctgcaggattaggcagttttagctgagggataaccacagtgctaaggaggctcatgcgaggtgggcgacctggtattaacatcaacacagaggccaggcgtggtggctcaggtctgtaatcccagcactttgggaggccgaggcaggtggatcacctgaggtcaggagactagtgtggccaacatggtgaaaccccgtctctacaaaaaaaagaaaaattagccgggtgtggtggcgggcacctgtaatcccagctacttgggaagctgaggtaggagaattgcttgaactccggaggcagaggttgcagtgagctgagatcgtgccactgcactccagcttgggggacagagcgagactccatctcaaagaaaaacaacaagaacaacacagaaacactatgggccactgacagttattcccaatagccattcaggcatgaatctcttctgatattaacaatggtgcatttcaagtacacaagctgatgatgaataaaatcccattttatacacatacgtgcatgctcttccagccttcatagacgtggggtggatggtggaggactccagggcaatgcccagcaggtgaatggcagggccacttcctaagggcccaggcatctgggcttgggcccagctcccctggctccagcatgaatgcctttcctcccacttctggcccctggactggccagatggtgagtgagggaaccacttacaaccatcagcaggcaggccacggtggagcctcagagggacatctgcagaaggacttatttttaccaaagagctgttctgaaaacccactcagcatctgcactgtccgaatgggatctgattgtgctgggtctgtgtactcattcctgcacttctccaaatttgtaggaattttttttttaaaaaaattccaacagaaaagttggaagaatagtctaataatatactcctcatccatattcaattactaatattttaatatatttatctttgtgttttgttcttgctgattattaaaaatcatttgcaaaattcaggaattttaacctcaaacatgtcaaactgtctgccacatcaggaagtcccattattcatgagctgagtttttcacttaagagagtaactcacagacttctctgtttttaaccatatgtatatatatattttttgccaatagtaactgttagacagcatgaaaatatcctaccaacaatttttgcttaatagctttagcatttaatgatgatccttctgagtcaattatttcattgaacctggaaaaatggtgatttttgtattacatttttaatgacctttctccaaagaagaatagcttttcctcatcaactatagagacactgtggttcctcttaaaatgaaaggtgaatgattaattctctcttgaatcgccaattttcacagtaaggaatcgtgttttgatctcttccagtgggggcaatcaagccatgtttgtctcttcctctcacttgctttctctgtaattttttgagtattattacatatacatggtgcactacagtcagttacggtagctactatctttgacagttaaatagacccaaatgtgattagtaggaggttcaagctggtttctgtatcttgttgacctgcacccataaaagtctgttgatcagtagctccttttgtttgataataaaaaatatctcaagcacgctctcataatactttgctgaatccagaaatggcatgccccattttccaaggagatatattgctttttaaaatccatcattttaacagggtatttggaaaccaaaagcttgcagggacattttctggacacatcaagcaaatatattttaaaattttgtttaaatatattttttaatattttactcaaatttgatataacttattttttgccttgacttctaggaattttcttttttttttcttttgctttagggccagagtctttctgtgtcatccagactgaagtgcagcactatgatcataactcattgcagcctccacctcctggcacctcctggctcaagcaatcctcccaccccagcctcctgagtagctgggactataggaatgcaccaccatgcccggatttattattattattaatttttgtaaagatgggggtctcacttttttgctcaggctggtctgaaactcctggcctcaagtcatcctcctgccttggcctcccaaagtgctgcaattaaaagtgtgagccaccacacctggcttgaattttgttttatgtgctttttttttttttttttttagtgaaaacataagctcctaataatcctatcatgctaaattacttattctatgtgtacatgatacattttcaaaattttagtacactagttacacgtgaactagtacagccactgtggagaagagtatggaggttcctcataaagttatgaatagagcacagaggtgaactgaaaactatgaattgagccagtgttcccattactgggcatttatccgaaggaaaggaaatcctgcgctcctgtgaatccctaggttcttgcaagtccctgatttcctgtgagtccctgcgttcccatgaatccctttgttcccataaattcctttgtttttgtgagcccctgtgttcccgtgaatccttgcgctcacgtgaaccacctgtgttcccgtgagcctgtgcgttcccgtgaatccctgcattcccgtgaggacctgcgttctcaggagcctctgcgttctcgttagcccctgcattgccgtgaatctgagttcccatgattgcctgagttcccatgagtccctgagttcccgtgagtccctgagttcccgagtccctgagttcccgtgagtccttgcattcccgtcagtccctgagttcccctgaatccctgagttcctgtgattccgagtttctgattccctgtgttcctctgagtccctgtatcctcgagtattcctgtacccttgtgaagcccccgagtttttgtgcatacttgcctagtacatggcaagtgatcaggtacattttttattaataagggattgcattgggattggtgattatcaaaatgggtcagtgctaaatagtgaattttccctctgtcatttcttctttcccccttccatgagaatctccttgtgtagctgagaagctgcagttaacattgtagcatcttgatagcgaatataaatccatagaccttgagaaacaaggcctagggactgtcgtctggagagttaagatttactttaagaaacaagagaagataaaggagataaatggcttcagccagttggccagggtaggaggatgtgagactggcagcaaatgagagtctcccaggcacacacaagcctctgagctgctacaagtgggagacaccaggaaagaggattttttaatgtggttcagaaataaatcctttttgactttacatttaacccactatcagtagatattcacataggttttttttttttaattttattttctggcccgtgtcttgaggagagaattagtctgggcccatgttatttatcctgtttgaaatgagggatttgagtaatcaccccccagcctggcctggacggtcactttactcttgggccatctccttctcttggcagcagtagaaggatgtggctccaagattgtgttttctcctgtagtgtgaggtgagtggccatgacattgggctgaattgatgctgtgttggaggctggatggtggtaaatctatttttatttaaattttctgcagtcagaatgtgcaaatagttgatgttgtctttattttccatcactgagataaaaggcctgacttattttgttaacatggaggaacataagttttatacttaaatgggtaataggttattattattatttttatttatggtttcatcgtcgaacatttttatgttgtggacagtgtcaattcttgcctttgtgggcccactcagacctgcctggtcagcccttgcaaggacactcgcgttgcccagccctggctccgtcactgtgccactgtcagcacatctgcaccccgcgtagtctggggacatttagacagccttaggctcaatgtcaagtggatccagaacctcggcagtctgcaaggagagttgtgtgtgtgccatcgatgtccgcttacaccaggtccggctgcaggctgctcttggacctccttgtccttgactgggactgaagacagcacacctgaaagctttccacggatgagcaacgttacatggagtatccactgacaatgtggaaaaactggtgtgtgctttacaccagtaataactcatctagaacaggggttggcgaacctttctgtgcagtgcgagatggtgatatttatttgtgattctgtggcaacaacagtcctgctctcgtggaggggaagtggctgcggtagacatgggtatggaatggatggtgcctgccagggaagcttcgtggcaccacaggggcctcccagattcaatccgtgggccacagattgaaaatgaagcagaaaaagatatttatttgaaaaatcgtaatactaaaagtgagggaccaatatgaagaaaacaaatatttaaataaatataaaacttaactaagccatacatgatgtgatgtgacagaaggttattatttattttttctataagtgaaattatactttaaatatattctgataaaaacatgaagactaagtttttttagacagggtctccatctgttgcccaggctggagtgcagtggcatgatcatggctcactgtagccttggccacctgggctcaagcagtcctcctgcttcggcttcctgagtagctgggaccacaggctcacgccaccacacttggacaattattttttaaaattgtttgtagaggtgtggtctcactatgttgctcaggctgttcttcaactcctgggctcaagcgattctcccacctcaccctccaaaatgctgggattacaggcatgagccaccgtgcccacccaagactatttttaatgaaaatattgattctgaaatttacctgcaataatgaaaagatgagaattaatacccaaggctctttgaaaaataaagtaataaagcagtgacttacactagcaaatgtcaaaacattgtcaagcaaggtggcactgaggtgacataggtaatacaggtccacattgtgtactctaccaagaaataaaaagaaagcagaaactaatacttacaatatgattacttgttagtgcactctatgggataatgaaataaatggcaggatataatgttagttattttgaaatattgtcaagatctgctacatacactctacgtggattagataacttatctaaaagatcaaaatatgaaacacccccactcacactgccaaaatcaaactatgttccccaccagaacactgaagggatgttgtagagcttaacagaaagagtagatccaagttcttgcctcagtgttttcccctagggatgatgagtaatgcagggtctgagtagtgcttgagcaggaagaagcatgccatcccagctgggagcaacttcaagagactcatggaatagaacaagggcccggttggtaaacatagcacaggacggggtgagggtggcaggagatatgggtgcatggaatccaggcagggcagccacacagggacttctgcatgcaggagatggctgtggacctgtgcggcacttctagaattcctatgatgagaagagcatgggggattcgcttcccatggctgctgttttttactgcagagcacaaacttaatatttttagttctggaggtaggaagtctaaaatgggttgcactaggctaaaatcaaggtatcggcaggactgcgttctttctggaaattctggagggcaatctgtttcctctggattctagagactgcctgtgcgccttggctcctggctacgtcctccatcttcacatcatcttcacagccagcggtgcagcgtctccaaatctcactgtgaccctggccctcctgtcccctctctgccttatggaggcccctgtgatgacactgggccctctgggtcatccgggatgacccccatctcacaagcctgagtctcatctgcaatgtccccctgctatgtgacattcacaggctctgcagatgtggatatttttgtgggggcctttgcctaacatagacagcatcattcattcattcattcattcatgagaccctgagactggtcaaccgcatttgagagatttgaaaatttgggctctgcaggaataattgacttgctgaactagttgttaagcccaggagttttaagtcagcattacaaactaatttggcattttgttttgttttgttgcatgtttatagaagttaaaatgcattctttaaaaccagtccaaatgtaatgagtaattttaatatgaattgttaatcagtttctggaaaagcaagcagctttgtttgttactggataattttgaaaagtttgttgttgttgttgattttcccagtgctccaacaccagatgcagacacgtgtcttttaattgaaccccactctagcattgttttatggtaattcaggattattaatcagactctcaattggcgttcctcttcagcacttagcgtgaacactgaagaacacgcaggggagaggacttgttctcctccttccaaattttatgcagtttttggcattaattcagaatctgctattcagtgcataaagaactcattagagttaccagtacagggacttagccctctgacaatagttttaggaaattataagatgtcatttgccaacatccaaaaacacaaataaataaaactgctaggaaaaaaagtgagggagatatcattgtacgggctagagttttgagattaaatattcatggatggctcttcgtgttttcctaggcatgaaattgttgacaaccctgcactcacccagcatgtctcattctcccgagtagccttgtgcatggaatggagctcaggaaacaaccctcggaataacccacttgctctgccttttaaaaataccccgattccacctctgtctcccatggcaaatggtctgagtgccatcctctctcactgggtgaatgcaggagccccctcctgcccttggcctgcccttcctcttcctgctctttgcctcctccttttgcctgtggcctccccctgcccttggcctccttctctcctgacttagtgtctgcacagcagccttgctgatttactgtctgcactccttggcttagtatctgcatagcagacagagtggttcttccacagtaacttggctcagcctccatcgtgctacccttgctcccttgtgtgatgctgggagcccctccatcctggccactcttgctgctgcagttagttctctgtgtcccgtgactcttttccatgtgcttcttgcacaccctaaaaacagctctcccctacatctgctcactgcctgcaccctggagagaacagggatctcgtctgcttgtttcctggagatgctcccgggcccacagtgctccctggtcccagcaagtaactcatgcatctctgttgagtaaagagataagcaggtgcgtctgacccacagacactacccagcaagtaactcatgcatctctgttgtgtaaagagataagcaggtgtatcattgaaggtgtgtctgacccacagacactacccagcaagtaactcatgcatctctgttgagtaaagagataagcaggtgcgtctgacccacagacactacccagcaagtaactcatgcatctctgttgagtaaagagataagcaggtgcatcactgaaggtgcgtctgacccacagtcactatccagcaagtaactcatgcatctctgttgagtaaagagataagcaggtgcatcactgaaggtgcgtctggcccacagacactacccagcaagtaactcatgcatctctgttgagtaaagagataagcaggtgcatcactgaaggtgcgtctgacctacagacactacccagcaagtaactcatgcatctctgttgagtaagtaggtcagtaggtgcatcattgaagatgcgtctgacccacagacactacccagcaagtaactcatgcatctctgttgagtaaagagataagcaggtgcatcactgaaggtgcgtctgacccacagacactacccagcaagtaactcatgcatctctgttgagtaaagagataagcaggtgcatctgacccacagacactacccagcaagtaactcatgcatctctgttgagtaaagagataagcaggtgcatcattgaaggtgcgtccgacccacagacactacccagcaagtaactcatgcatctctgttgagtaaagagataagcaggtgcatcattgaaggtgcctctgacccacaggcactactcagcaagtaactcatgcatctctgttgagtaaagagataagcaggtgcatcactgaaggtgcgtctgacccacaatcactatccagcaagtaactcatgcatctctgttgagtaaagaggtaagcaggtgcatcactgaaggtgcgtctgacccacagacactacccagtaagtaactcatgcatctctgttgagtaaagagataagcaggtgcatcattgaaggtgcatctgacccacagacactaagctctggctgcacatcctacgcttactgaacctttagaaatacctgggtattcactgactgcaggtatcctgatagggtagcacctgaatggacatctgtagtgtttaaaatccccacagctggttccgaatgctggctgagaagcttccttcctcgggtcaggctcatttccctctagacgggaggcctggtgtcagtcacttacaatgtccaaaccttctcagctttctcttctttgaaaggtccagaaaccctctgctttcccttcatgtggatctatctttccttatgctttactcgaaaagactctgggtcttacaacactgagtagttagaactccaacacattcctggtcctctctgcctctgcatctgttttccaggcaacctccttttttttttttttttaaatgctaatcacatttgcatgaaagccagggattcttctcaccctgcgcttctaagcaggatgggtactgttccgtttgtgtgcatttttgtgctatattacacgcttttacagtgaatttgtatctactttttaataggaccaggccagttctagagtctagagtttttagtaatgtgctgtcccatgttcatctccaagagcaaaagccctgccactggctcttgggaaatgtggaggcatgcaccttctgtccaggctggagtgtggcttcaggcaggatcgggaggggctccggcggcctggacagcaggcccccacgtttccgggctttccagcaaccccagcctacttatctttatctccccaaatcatatatcgaaaaccccagtttatttctataaataattcatatttacttttatgtttcaacttagaattggtacgttaccaaaagtctcagctaactataggaggctagtttgatttacaatttttaaatgactaagaggaggtggtaattaacacaaaaaagactgattttctttgcaggtgagggaggtcaggaaaatatattgcagtggtacaagaaatatacttgacacttgattaaacaagctataacatgtctaaataaattcacagtgtcaggttttggtttattgcattattgaataatagtatctaagaataataagaccccttggttatgctgcttggttatgcttgaataattcctttttgaaggaaattaagaaatggaatttggtcattgtagaagtttccgctaatcagcaatgttgtcctgatcagttgacacatgagttctccatagttctggcgttacaccctgagaccatgcgtgagagcatgaccttacacgttctggtcccgtctcattccttccagacttaagctgctgtcgccgccaaggtgcactcattctggtgccccctcagtgctcctgtgccatctcatcctctgctaagtcagccctgactcttcttagaccttgatgcatgtcattggcaagagtcacctttccagaaccttcagtggtgaccttttctcagtcataaacctacagtggcagcccaagtaactcacacctgacctctttctagtcaagtactctggcttttccctgttaggcatcatcttacctttcacatcttacgttcctgtatcatttccagtgttttacactctcgctaaatagaagctgttgatgcagagtgactcggcagccattccctttccctgcatgctgcctccttcatctcttctatctacaccttgagtggctgcaggttgtcttagggatgcttccttgccccttcggaagtgacctttccttcttttgtacatcgatcataaataacttgtagctctcattgcatgcactggttgttgctttagctgtttgcattttcctgtgtcactggctgtatttgatgctgaacttcttgagctgtgcagtcatgccgccttccactgtgcctggtgcagtgcgtgtgttagagacgtgcttcgtgcttagaaaggaggatttcagaggaaactgtgggagccacttgatccctgggccacatgatcttaatttcaaatgtagctgtggtcagacacaattcaattaaaaaaagggcaagggacacacagagacacttggcctgtgatgacacatggatggtacaaacacacaacaagatgtacttattggaggctgctcacatgtgcagctgtgattaaacaacaccgagctgtccacacgtgtgccagtgagcatttgatggtcagcattatactttggccatgtcagtcatggccttttctcagtcataaacctacagtaggttaggtgttcctgtcagaggcatggtgaagggtactgagcactgctgtacactcattttccatcttctcaaaaatctacaattatttcaaaataagtaaaaatatgttggcaacatgttatgtgtattacattgtattcaccttctggaactttctcaagtgtaccataaaactgtgcatttactgatttccttttttcctgttgacaaaggaagaaatccatggttctgctgcagaagagccacgtgcaccgatgactattcgtgtgaccccagattcactgatttccacttttatgaactcttttaagctgcagttgtgaaattcgaagataccaacatgttgtagggattattctttaagcaagtggtagttagctagttagacaggttcttaagtaaaaacaccaataaatacttctgttccagtcttgtatggcagagtctatgaaagcaaagaggttctgagaggaatcccaaattagtgaatttgcaggctccaatattgcatgaaacagtgtgaaatttaacatattttgaaatgtttactttaggtagcaaatataaaagcagccacctgacttctggagatccttggttttgtttttgttgagtggactttacgtgcagagggttgagttgttgagttacacggttggagacaggtctgtcgctggtctgtgcagggttcttctctggtgttttctgttcatgctcccatttcctcccctctcagggaacagtcctcagagtgtcagatgggcacactctaattgtagcttcctaagatgtgctttaattgacatgaatagacttatagtctcatatggtttctcatggttttcactcagcagttttaaaattttatgtgtttggctatttgtatatatagttcattgttatatatatatatatatatattttttttttttttttttttgaggcgaaatctcactccattgcccaggctggagtgcagtggtgcgatcttggctcactgcaacctccgcctccagggttcaagcaattctcctgcctcagcctcctgagtaaatgggattacaggcacgtcccaccacgcccagctaatttgtttcacatttctatgtagtaatgaagtactgatacatgctacaacacagatgaaacttgaaaatattcgaagagagagaagccagatggaaaagacctcatgttgtgtgatcccattcacatgaaatatcatgcataggtcaatccacagaaactgaaagtagatttgcatttcctagcgatgggaaattgggactgactgctaatgggcacagggtttgtttctggggtaatggaaatgttctaaaattagcagtgatggttgcacaactctgtgaatacagtaaaaatctgaattttaaatttaaaaatggtgggctgtatagtatgtgaattatatataattaaagtaattattaaataaaagtagctactgacagcattgcttgtgacaggtggaagggggacctgaaatgaagcgtcatcaacaccaaagtgaaacacgggcaggcagggccctaacaatggaacaacgctgcagcgggaccacgggctggggcacgggagcacggcgcctcatgattgatatgaccaagaacttcttaagcaaaaccgcaaaagccaaataagtaggccagattacactgtacagtgaaacacacagtgaataaatgtaaccgagaaatgacagattacaaaatgttcctaaagtctaaaaatgaaaacgaaactacacacacgcacgcacatatatcaggaatctgtagcaaatctacaagataaatgaataagcccaaattttagatagcccaaaaatataaacaggtataggcaagggaactcaggtaatgggtaattgggacactttcaattgttccctaacttatttgatacatttaaattcacataatgataagatatcctttatgcccaagatgtctgcaaaagtaaaataagaatcatgccaagaattggccagtttcctcatgtttctgaattaagaaggacaacatgtagttttcaccattaagtatattatctgtgggttgtttgcaaatgctcttaaacagtttgagttagttactttgtatctacctcattggtagatacacccttggtgtattccaatgtacctcattggtagatacatcaagggtgtatctacccttggtcactgtgttagatcattcttgtgtcactataaagaaatagctgagaaaagaggtttatttggctcacagttctacaggttgtgcgagcatggcactgacatctgcctagattctggggaaggctcaggaatcttccaatcgcggcagaatgcaaagctggggcagtcatgtcacatggtgggaatggaagtgagagaggggagagatgtcacacacttttaaacagtcacatcttgagaggactcactcactattgcaagaacagcaccaagaggatggcactgaaccacttacgagaaatatgcacccatgatccagttgcctccgccaggttccatctccaacattggagatgacacctcaacatgagatttggaggaaacagcatcccagttggtactgcagcctcaggcaattgtgatgctaaacagtggccactgactgcttttgacagatgccctgggagggtgttgtcctgcagaggaagctctgagtcaggtcaacaaagacaagtccagagagtagagccttccagggggttgctggtcagatccaattctgacagttttttggagatgggacttttggagaaactccacaaatgcctgtcccttcttcaagggctgctacgttgcctgtggcacagttactacagctgtgaggccgctggtgttgaaggctgctgcagagctgtggagacggggatggaaacagggtatgttaaaatatcataaagcttactcttcccagcgttcagatactttgcttagtaaaatctcctctgatcactgctagcctttgatcaacttttggagtcctgaaaaagttgtggccaacaatttttgccagtctgctgtcttgctcttgtggaggtctggattgaccttggagtagaagttccctgtggacctgtggacaggcttctcatacccaagattgagattactgtgttgtagtctacactcacaggcattttcacaaagtaactcaagattgtttggcttagttactggtccagcctgtgctccctgcaataacacatgagtgtttccagtttcttcctaaccccaccagaaactgatttttttaaatgaatgtgttaagtatagtgatttcataaaacttgaaatattattttcttctttcttgttttttatttctctttctttttaaaaatatatttttaacttttatgtttagaggtacatgtgcaggtttgtatatgggtaaattcatgtcacgggtttgttgtacaggtttttgtcacccaggtattaaaccagtatccagtagcattttttttctgatcttctccctcctcttaccctccaccttcaagtgggcccagtgtctttgtgttcatgtgttctcatcatttagctcccacttataagtggccttctgttcttgggttagtttgcttggaataatggcctccagctccatccatattcctacaaaaaaacttgatctcattcttttttatgactgcatagtattccatggtgtatatgtacaacattttctttatccaatctaccactgatgagtatttggttgattccatgtctttgttattgtgaatagcgctgcattgaacatatgcatgcatacatctttctttataatagaacgatttatatttctttgggtatatacccagtaatgcaatggctgggtcaaatggtagttctgtttttcaatctttgaggaatcaccacactgccttccacaatggttgaactaatttacgcttccaccaacagggtataagtgttctcttttctctgcaacatcaccagcatctgttattttgtgagtttttaatagtagccattctgactggtgtgagatggtatctcattgtgattttgatttgcatttctctaatgatcagcaatcttgagcattttttcattagatacctacaaagagagttagattcccgcacaataataatgggagacttcaacactccactgatagtattagatcattgaggcagaaaattaacaaagacattaaggacctgaatttagtactggacaaaatggatctgatggacctctaaacaactttccacccaaccacaatagaatattcttctcatcaccacatggtacatgctctaaaatagaccacacagtaggacataaaacaatcctcagcaaatgctaagcaactgaaatcacaccaatcactctctcaaccacagtgcaataaaaatggaagccaagacttaaaacatcactcaaagccatgcaattacatggaaattaaacaaactactcctgaatgacttttgggtaaataatgaaattaaggcagaaaacaagaagttctttgaaattaatgagaacaaagatacaacaatcctttattttattcagtgcattgcttccttcgttattgttcctccaagtcaaggagcattcaatattgtatttgctgagtgtctgaggctcttctctcatcagggagtggaattctgttgccctgtgacaggcaggcagagtctgactggcaatgattgtctgtaactgatcctggcagtgctctatggtgctgtagaatgagtattataaaatgtattgagggttactttcaagattcttaattttgttatctgaatcttttgtaccgctacttatttccctccatttgttctatcaagagatggaccaaaaaggactggaaccaactctccagctgcaattctaaagatgctcattgtgtacttcagcggccggtgttttatttggaatgcttgctgggtttgcatatggtgttggttgctatatcttcttgatttattgttcatttcaccagtgtttagttgttctcatgggttttgtttttgttgctggaaaatctgtttaaacagttttaaatgggcacgatcctccttttggggttcatatttgcctactttatatatctaaagtcttttattttcaactcttgtatatttgcatttatcttcagtgtgtttttgtttttattttgtctgcacatcttatctgaaggggatggagatggaacatgagtatttgtctacatgggaaatctatttttttccaaaataaacaattacactgtccgccaataatgataattattttcccttctttacaaatcattaaacatcataattgtatttcctaccttattaatttgactgggatttttctgtaaccttgttaaatggtagtgatgatagtggaaatatgtttaaactttttgccatctgttaataggctcataagatttttgtctcttggtttttctaggtgatttttaacttacggtttattagcatcagcttctgctgacagaactcctcatatatttggtgttattctttcattgtacttgtagattatattttcttggagagaaagagatattctgcttatattaaaaggggagatttgttctttatttctttcttttctatatttgtcacatttttctttattttttttcaaacatagcaggaatcacttcctcttatctatactctgatattctttacaaggcatagtatttttttctcaaacgtttagaagaattcaactataatcagtctttgccttgagtctaaaagtgactctgataaatttctaagatctcatattgttttaaaacctacttaagttttgataatttaatttttcaaagaaaattgacactttaattaaaattgtacatagctagtcacactccccactgtggtttttaatttgattctatgtttctatggcaggttattttacccatattcctttctgcctgggtttatagaagtgacattttcttaagtggtatcacaacattaaattagaaatgtcataaagtatctttaataatggttttgtttgttataattgttctgtgattttttccagctgatcccccaattgtgttaattatgttgttaaaatacgcactgatttaaatctcactgtctgcaatattccccttatcaaaggtaaacaagaccttgcccagcgtttgtcttgagcttagttctttcagaataccgtgtctctctctctgcgtcttattagcctggtgagaacagggcattcatcctatagtgtctcaccatgtgagagactcaggagcctgggttgtgcccacatcatgtgctgccagacctggaggtgagggcagtatggggtggactcagctcccaggggcacccgtgccttgcaggtggctgcctgaagttcactggtccatggagcacaagcaaagtagaaacccaccaagtctgagtggctcgcagctgcacgctgccatttctgtggccaagtgggaacattctgtcagcactcagggctctccatctgccttctgcttctctctgtggtgcggagcccacaacaggtcaaaacctgacccagagccagctggaccatgtctgggtcctttgggacaccaaggcagtgggggctaacacccgaggctattcctcaccccatgcctccctgcctgttctctgaaggaggaatccacatccccaggctatgctgccatagccctggcccacagatctgagccagacatggatttaaagggtgtgattcagtgtttttattatattcacagagttgtgcagcctttggcacaataggttttagaccatttccatcaccccagaaagaagccatttacagccattttgcatgctccctgccccagtccctggccaccagggacctgctttttgcctctctggatttgcgacttctgaggctttatatacacagaatcataggacgtctggtgctttatatacacagaatcataggacgtctggtgctttatatacacagaacataggacgtctgatgctttatatacacataacataggacgtctggtcttttgtgtttgggttcttctacttcgcatcatgttttgggggttcatttttgttgtttgcatgaatcagttcttcattttctttgattgctgaataatattccattttatggctacaacatgttatttatccactcatgagggatggactttctggtcgtctttaagcttggctgttatgaatcctgaggctgtggacggtggtgttcaagctttggtgtggacctgagtttctgcttctcttgggtatgtacttgggtgggcttgctatgtcacatggtcactctgcttctcatctgtggaagagttttcagactgttttccaaaacaactgtggcattttgtattcctcccagtggtatatgaaagttccctcacgtctgagcaattatgtatccgttgtcaaaacctggccctacttttggtcagaggtgtttgcttaactttggttctacttgatcatctttacaaataaaattcatggcctcatgaccaatttcatacttggttttcttttaaagctgaactgctgtcagtattcaataaggaagatatctgtgtattatttccataatacattttgggcaagattcattttctgtaaccacgttctcatagaatgaacctaggagtttctactttcagactggcaaaaataaagcccacagctaattgtaggggaaaatgtaatcctgggatatctaaacttgtatgtgaaatgaacagtgacttctcaaagtattgtgtcatggacccgaggaagctccgccttccttgaagtcatagcccctcctacagttctgtcttccttttgttcatgtttggcagcatccaaattaaccttttctgccattttccttttaaataagttaaaattcaaagaaattcaacatggataagataaatcttagctattattcgagaggatttatcttctaaagaacttgcttataaaatagtaactgtaattgttttgacacgtggaactcaagttcaagctcacctttgtaacagttttgcagatggttcaagtgagcatgaaaagcctggtaaatcaagtaactaaagtttttattatttaaaggaaagctagaagcctagtcttaatttaatttcacagtcaaatgtggcatctaatgaactatgtggcacattgggaagatttagatccactgcctgtttttcatccttttccacctgcagtttattcttcccaagtgagctcatattgttatgcttctaccttttttataagaacaacatctttattgaaaaacatgcatcttggccacatcttccactttgcaaatctgtaagttcatatggagtgtgcataaagctcccacagactcatttctgaaggtgatagtatcttttatacagtaattagggtttatctttaattctgcattttgaaatcaatgataaaaattcccagttaaggtatataaagaaatgttttgacaacttcaacagtagttgtctgagtgactgacagttgatttttagtaatgataaataacaattcctttattttcttgtgatagttttaatgcattctctgactctgaaatatgtgtacaagcctttccttccattttttctcacaattagattgcattttaaataccgtttaagcaggtagacgtctattttaaataacattgaaatgctttctgtgtgtcaaattcagattattcaaatgttatgccattttgttaaaaagtcttttgatctttgtgacttatttcagcattccatttttacaaaaataggagtcattcaacagcatgaagttctaccattatttttctttgaaaatgccccctaagtaggtcattattgactggtcttccttgttttctttgagggccatcaatcttggggggatggcagaatcagtctctttttatcagacactggtatggtacggcatgatcatgactggcgtttggctctctacaaattttaaagccaagtcataaaagacctatttattgacatttttttctggattatggaaaaatataagcgctgctcctaataacaccactgggaagctgtgcagctgctcctaataacatcactgggaagctgtgtgtgcagcctcacttcagggctgtcagccctgctctggaagggttgtgggggacctgtttaaccttctccatctttctgcagacaggaggctggcggctgtcctgggcacacgctgtgaacctctgggctccttttggctctgagcagatgggacactctgggattgagctggctgtcagagggcttcagttgaaagagaaggtctctggggtcaggcattccttattcttatcccagatctgctttgcaggattggcctgtgcgggtcacatgaacactggggcctctgtcctcacctgcagctcctttccaggcacgcttgtgggggctgccacttacgcctgcatcattctcttacagtcaattgttgttaacttgcctgtcccatagaatcacctgcaggcaggataaattcctgcaccccacgccagtgacaccagagtccctgtgggcggaacccaggcatggggagttttgaagcttcccaggccattccactggggaccccagtttgagaaccccttctctggccctcacctgctcgcctccctatagcctaaacctctcctcggattccggctcccatggccctctttcctcctgtctttctccagctttccccttcccgccacctctgctttcagtaccttgccctgtccagccccacctttgcactgactggctccaaggctctgacttcctctggcctccagggaaagtcagtaaagttcaggggtctttctggttggagtttctgccggccattgccgaaatccacattgatctaccaaacacattaacctgttgataatagaaaaactttgcttcctgaaacatgaatttccctttttcatgcttcaaacaaaaaccaatttagatgtttttccttaacatcatacctgatggtatgaagcatttcaaaagacgtgatgaagaaacctcatttctgaagaggctaaaacgcataatgacagtgtaagtagcagaataactaaatcctccctgtcctgccacccttgacgtttgatattaattatgcttcaaaaatatgcctgtgtgatggagcccggctgtgccatcagagcagctgtttgatttctgagtttgcttcatgttcagtttgctttttctgtccagtggaagcagtgaagccctcagtcaagtgaatcagacggctttttggtggaggctaatgttaaattccgggactggcagagaaaagggaataccttttgtcaggcacatgctaaggtgtgtgattcctcttcagagggaaagtggcctctctgcatctgtcccgcagcatgttacatatcctgtactttctagggcgaattctcactgtgtgtgctgcagacaccttcacctgcagttttgtttgtgttgctctcagtgcggtgcttagtgtaaagaacagttaaccatagttggatttgtcagcctttaccacgtggtgtttgctttttctgcctgcaaggaaactttgctaagccccaacagtcaggaagatctttattttaaaagctttcaacttaaagtctttaacatgtctagacttaagtaaggatccaatctactgtttttgttgttgttgttttttcatgtgtataatcaattgcctcagtacagtttatttttattgctagccgatatagtttggatatttgtccctgccaaatctcaagttgaattgtgatctccagtgttggaggtggagcctggtgggaggtgtttgggtcatgggcaccgattcttcgtggcttggtgctgtcctcctggtagtgagtgagttctcacgagatctggttgagtaaacatgagcagcacctcccctcccactgcctctctcttgctcctgctctgccttcaccttctgctgtgagtcaaagctccttgaggcctccccagaagccaagcaatgctggtgccatgcgtcctacacagcctgcagatctgtgggctggttaacttcttttcctcataaactacccagtctcaggtatttctttatagcaaggcaagaacagcctaacacactagccgtcagcaatacctgtcaaaatcaagtctccttggaatgatggggctgatttggggtcctctgttctgttcttttggttgattttctaagcctgcaccatctttttcccagagttccaattattatgacttaataataccatatttcttcagttctaagatgccattaacatttacatacaccattattttatgtaacactacaaagaactaaggctacaaatgaaatttgaaacatctgttgtatgatagaacttgatttcacagatgctgaattatgaatgcatattagaactaacgacagataccaaattttcttttttaaaatggtggattagctcctcttgggactttacatttccttaaattttagggccttttttgtcaagtttcaaactaattcatgctttgattggaattacattgactattgatcaattttgggacatttgccatcattttattgcatcttcttattcacaaatatttctcaatttaactagtatttctttaatgattttctttcttttctttccaacttttgttttaggttcgggggtacacgtgcaggtatgttagaggggtaagttttgtgtcatgggggtttggtgtacagcttattttgtcactcaggtaataatagtactcaataggtagtttttgattcttacctttctcatactctccaccctcaagtaagacccatgtctgttgttcccttatttgtgtccatatgtactcagtatttagctcccacttacaaatgagaatatccagtgtttggatttctgttcctgtattaactcacttaggataatggcctccagctccatccatgttgctgtaaagcacagaatttcatcatttttatgactgcatagtattccatggtgtatatggaccacattttctttatctgctccactgttgatgggcatctgggttaatttcatgtctttgccatcgtgaatagtgctgggatgaggatagacatgcatgtgtctttatggtggaaagatttgcattcccttgtgtatatacctggtaataggattgctgggttgaatggtaatgtgattttaagtaacttaagaaatctacagactactttccacagttattgaactaatttggattcccaccagcagtgtgtacctgtaccctttcctctacaactttgctagcatctgttgttttataactttttaataatagccattctgacagctgtgagatgatatcttgctgtggttttgatttgcatttctctaatgattagtgatgttgcccattgtttcatatgcttgttggccacatatacgtctttttttgagaagtgcctgttcatgtcctttgcccatttttaaaatggggttgtttgtttcttttgttagatttgttgaagtttcctataatggggttgtttgtttcttttgttagatttgtttaagtttcctatggattctggatattatacccttatcagatgcatagtttgcaaatattttatcccatcctgtaggttgtctgtttactctgttgatagtttcttttgccctgaagacactctttagcttaattaggtaccatttgtcaacttttgtttctgttgcaattgcatttggagtttttgtaatgaagtctttgctaggccctatgtccagaatagtatttccaagtttcttctaggatttttatagttttttttacatttaagtctttaatccatcttaagttgatttttgtatgtggtaaaaggaagaggtccagtttcaatcttctgcatatggctagccagttatcccagcacgatttactgaataggaagttctttacccattgcttgttactgttgactttgttgaagatcagatgcttataggtaggtggctttatttttgggttctctaatttgtcccattggtctgtgtgtctgtttttgtaacagtactatgctattttagttactataaccttgtagtatagttagaagtcaggtcatgtgatgcccccaggtttgttctttttgcttacaattgatttggctatttaggctatatttggtttcctatgaattttataattggtttttctaattctgtgaaaaatattggtagtttgatgggaataacactgaatctgtaaattgctttgggcagtatggacattttaacagtattgatccttcttatccatgagtgtggaatcttttttatttgtttgggtcatctctcatttccttcagcagcattttgtaattcttattgtagggagctttcaccaccgctgcccccccaccccggttagctgtattcctaggtattttattgtttttgtggctgttgtgaatttggctctcagcttggacattaatgttatatagaaatgctactaattttgcacattgattttgtattctgaaacttggctgaagttgtttctcagatctaggagcctttgggcagagacaatgagattttctagatataaaatcatatcatctgtgaaaagagataggttgactcttggaagccttctatgtctttctcttgcctgattgctttggctaggacttctagtactatgttgaaaggagtggtgagaggggcatccttgacttgttctggttctcaagggaaatgcttctggtttttgctcattcagtgtgttgttggctgtgggtttgtcatagatagttcttatattctgagacaatttccttcaatgcctagtttgttgagggtttttaaaatgcaaagatgttgaattttattgaaagctttttatgtgtttattgagatgataatatgtttttttgttttcagttatcttcatgtgatgaagtatatcgatttatttgcatatgttgaaccaaccttgcatcccagggataaagcctacttgatagtggtgtattacttttttaatgtgctgctggatttagtttgctagtattttgttggggattttttcatctgtgtttatcagggatattggactgacgttttcttttttttgatgtgtcgctgagaggttttggtatgatgctggcttcacagtatgagttaggaatccctctgcctcaatttttttggaatagtttccgtagcgttggtaccagctcttatttatacatctgttacaattaggctgtgaatacatcttatccagtgctttttctggtcagttttttttttgttaattattaataagaattcaattttggaaactaacattggtatattcagggtttcagtttcttcctggttcaatcttgatagattgcaagtttccaggaatctattaatttcttcagggttttctagtttgtgtgcatagtggtgttcatagtagtttcagagggttttttgtatttctgtggagatagtggtaatgtccccttagtcatttctgattgtgtttgtttggatcttctctcttacttccttatttgtctatctagtggtctaacaattttattcactaaaaaaaaacttttggtttcgttcatctcctatggtttttcacatctcagtttcattcagttcagctctgattttgcttcttttttcctgctagctttggggcttgtttgctctttctttttttctttttcaaggtatgatgttaggttcttactgtgaggtctttctaactttttgatttgggtgtttagcaccatgagctttcctcttcacactgctttagctttgtccctgattctagtatgttatatcttagttttcattagtttcaaagaatttcttgatttctgacttaatttcattatttgcccaaaagccattcaggggcagattttttaatttcagtgtaagtgtatggttttgagacatcttgtttatattgatttctacttttattgtgctgtaatatgacagtgtggatggtatggttcaggttttttgaatttgttgagaattgccttaaggctgagcatgtggttaattttagagtgtcatgtccatataaggagaatgtatttttcttgttgtgtgaagtgttctgtagatgtctattaggtctgtttggtcaagtgttgagtttaaatcctgaatatatttgttagtattctgcctcattgatctagtactgtcagtggggtgttgaaatatctcactattattccgtggttatctgagactctctgtgagtctctaagaacttgttttatgaatctgggtccttgagtactggttgcatatatacatatttaggtggttaagtcatcttactgaattgaacccttcattattatgtaatgatcttcttagaacgttttgatcattgttttttaaagtctgctttgtctgaaataagaatagaaaaccctgctgttttctgcttgcttcatagatctttctctattcatttcccctaagcctatggacgtccttgaatgtgagatgggttccttgaagactgcatttgtttaggtgttgcttttatccaacttgccatctgtgcctttttaatgggacatcagcatgtttacattgaggtttaagattgatatgtgctggttcgatcctgtcatcgtgttattaggtagttgttatgtagatttgattgaatagttgctttatagttcaatggtctatgtatttcagtgtgtttttgtggtggccagtaacaaccttttgtttccacgttttgcacttttttaaggacctcttgtaaagtaggtctggtggtaacaaattcccttggcatttgcttttctgaaaaggattttatttccccttcacttatgaagcttagttttgctggatatgaaatttttggttgtaatttattttttctaacgatgttgaatataggtctccaatctcttctaggttgtagggtttctgctgaaaggtctgctgttagcctgatgagattctctttgtaggggatcttcctcttctctctctctgtctttaacattttttcttttgtattgaccttggagaatctgatgactatatgtcttggaagctggtgatcttttatagtacctctcaggggtcctctgaatttcctaaatttgaacgttgacctttctagcgagaatggggaaatttttgttgttattttccttaaatatattttcaaagttgcttgttctcttttcttctctttcaggaatgtcagtcagtcataggttttgtctctttatgtagtctcatattccttggagatgttcttcagttttttctttattctggtctaactgtgttaattcaaagaactggtctttgagctctgagatttgttcctcagcttggtgtattctgctgttaatactcctgattgtgttatgaaattcttgtagtgagtttttcagctctatcagatcagtttggttctttttaaaatgggtatttcatctttaatctcttggatagttttactggattccataaattctttggcttgggtttcaactttgtcctgaatcctgatgatcttccttgccatccagattctgaattctacttctgtcatttcagccatttcattctggttaagaaccattgctggggaacctcatgtggggctttagggacaagaatacattttggcttttagagttgccagaattcttgtgctggttctttctcatccatgtggtgagatgtgtgctgatactccttcagctgtgtggtgtaatttgtgtacagtcagttggcttcatttctggatgttttcagagggccaaggctttgtgctgggtcttcatttgtagttgacctcttgccttttgtttcacatgggagtaaattctcaaagtattttggtgttgcagtttgggctgcaatctagtaggtggtgattaagtgtcattgctgattggtgggctcttgctcagccacgtggttcctttttatttcctcatgtttgcagccctctccctttcagtgttctgagagcatgggctcctctcccattcaagtgttggctgtatatctcagcttgacactttttttaaatcttatggtagactaaggtacacacacagaaaatgctgaatgccagcataaaagcagagattttaaagtgtcaccgcttagaataatgtttattgcaggggttttaaccaggtgctgttcaacagatataggaaattcctatctattcctactttgcaaggaaattcttatgattatttatccatatatttagatttttaatatttttgtacttcttaacattttaatgttattttaatgtataaatttattccttatagtcttcatccctatttcaattctttccttcacctcatcatagtcattcgcattgtctctttctattgataagtttctacaaaatgcctactttttgtgtacacatgcattattttagtcagtgttttactgatatacaatatgcaaagggaaaagtgtccaaatcatatgaatagctcagtgaattttcactaagacctccttatgtggccagcgctgacatcccgacatccagcactcacaccccgacatctggtcagtcactaccagtcaagagtgaattagtgaatgacttgtaacttcactatgataattttccctgatgccaaactctctccatatatagatagatagatatctatatatatacacacacatatatatcacataatattttatgatgtatatccacactttgcttgtagttgcactttgtatattgtattcgctgtgtgaggatgccaacacttctctgtactacttgttgctggacactggtgctgttatgtggtctcggttgtagtagatgacactttaaacatcctttcatatgtctttagatggacatatttgtgcagctctgttgagcgaaaacctgagagtggaattgcagcttgaatgtgcacatgttcagcttttgtagaaactgacaagcagttttccaaagtggttgcaccatcataaacccagcaactgtaaatgagaattgtgattgtaccacaccttttgtaaaccttgatattcattcaccctctttgattttgttcattcttttgtgaggtgatgttgttttattgtggatctggtttgcattctctgctgattaaatcatgctgcacacctttctatttgtcatcagtcattcacatagcctttttattttgggtattatacattttaataggctttattttttatagagttttaggtttacagcaaaatgggacataaaatatacagatttcctatgtactcctagtcccccttccccaaacagcctcccacactatcagcatctcacaccagaagcttcttttgttacaatcagtgaacctccattgacaagtcattgtcacccaagtctggagttcaaacgaggatacactcttggtgttgtacaatctatgagtctggacaaatctgtaatgacaggtaggtatccaccattatagtttcatacagagtcacttcactgccctaaaattcctctgtgctccacctgcccattcttccctccctctcaacccctgacagccactgatctctttactatctccatagtgtgccttttccaggtcagatagttggactcgcacaatatggagcctttacagactggctctttcccttactaacatgaatttaagctttctttgtgtctttatgtggcttgccttctccttttgttttaatgctaaatcgtattgtctggataaatcactgtttcttcattcaccttcatattggttgattccaagtttttgcaattatgaataaagctgctataaacatttctgtgcaggcttttgtgtggacatgttttcagctcctttgggtaaatagcaaaaagcatgcctgctggatgatatggtgaaactatgtttagttttgtgagagactgccacactgtcttccaacatggctgtaccattttgcattctcaccagcaatgaatgagagttcctgttgctctacatcttcaccggcatttggtattgtcagtgttttgaattccagcccttctaattggtgtgtgctagaatcccattgctgttttaactggcagttctccagtgacatgttattgaatatcttcccatatgcttatctgccatctgtatgaatcatttgatgagaaatctattcagatctttgcagactttgaaatttgattgtgttattctctttttttcagttgcctacttggatccttgccagtgtttctcctgggttgttttttgtttttatttttaccgatttaggagttctttacatgttatatgtatgagtctttatcaaacatatgagacacaaagatctgtcactctatgggttcccttttactctcttggtaatattcactgaacagaatttttttccttttaatgtagacttagtttatcaattgctaatttacaattacaacttttccccttcttttcaataaatctttactccagagtcatgaaattagtttcatttgttttcttttaaacactttattgatttaccttttaaatttagatcaaaattccagctagagttttttcttctgtatgctctgaattagggttcaaagtttgtttccttcctatttattgtagagattattctttccaaacttcactgcaataccacatttatcacaaatgtggagttgcatatgtggattttttttttgactttgtattctctgtactccattgggctattttccttgagcaaattttctattgattgaattgctctaagtttataatagttcctgatatctggcaatatgaatcttaaactttgttttcttccaggatttccttgactatagttggccctttgcatttccatttaaaatttagagcccctttatgaatttttatgacttattctaggattattattaaacagcttccaataacaattattgttttgaatatgtagattacttaggggagaagtgacaacttgaaaataattcatcaaatccataaacaagatctagtctgtaattcatttaggtcttcttaaattcctcccaataatgttttgtaatttttatcacagaaattttgcacatctttcattagatttatttctagatatgtttaatgctactgtaaattgcatgtttttatttcaactattttttgttgctgatatgttgagacactaaaaatattgacataataaactgatatttttattaatttcaaagattaattgcttatctgttttcatatcacatgcgtagatacttttggattatctccatgctcaataatatcatctatgaaaaatgctggttttattttttcaatgtttacacatttccttcctccctccctctccccctttcttcctccctccctccttcctttcctcccttcctcccttcctcccttccttcctgtttgctttatgattgtattggctgggagctgcagtaccatgccgtattgaagtggtgctgttgagcaccctttgctcattccttttctcaggaattttcaagctttacgctgagtatgacatgtgctgtaagtcttttgtagacgtctctaaccagttatggaagctctcttattaaaaggctttaggtaacaacatttgtcaacacttttttgagattaatcaatgatcatataagttctttgctcatatggtatggttgccagcctggaggaaggcacctggtattcactcccctgtgcaacccatctgatttgtactcggggcagcttctgttgtcatggtgtatggcatatctgatgatctgccattcctgatactgggctataaagtctgcagtttctgtgctgggggcaagcatttttcctcctggatcattctttccagtatatgccatgttgtgaactatcattggagaggcccacgtggcaaaacactaaagcctccggcagccaccacaggagcgatctggaagcagatctgctggccacacctgagccttcaaagacggcagcacccccagcagctgggctgcagtctctgcaggacccggagccagaagcactcagctgggctctcacagaatcctgacattcagaggctgttggttgttggatattttattacacaacattagagaactcttccatgttatgaattacgctgattttcaaatggtaaactacccttacattttttattgtagttgctttaaaagtattttgctttttatattttttggattagatttcataatattttatttaggattttttttatttatattcatgggggtaattgataagtaattttactttattataaccttcttgttaggttctggtctgcagcttaggttggttgtataaatgagtttactggtagtcattgtttttctattctgtggaaaagtttgtatagtatccatgttatttatgaaatatttagaggaattcactgggcccagagcttactttgtgaaataattttaatactaagttcaacttttaagttacgtacaggaatatttatatttttatttaatattatatctgttttagcaaattgcatgttttaaagagttcatcctttgtacacaaatcacaaactgtaaggtaaaacattcttgctattttcttgtgtgcttttcatatctgcgggactcatagtggcttccccctttcctcatctggctgcttctgtgtgttctctccttatttctcacttcttccagagaactgttctttggctttgttcattagttgatttgtcttctgtttcatgtatttctgctcttatttcctttattctctttcctttttcttgctttgcttttggaaactgaaatcagaggtctctaaagtgttttgaaagccacatggtaccttaggatcactggccatgtcgtcctttatagacaattctgccatcctttcgtggaagcaggtgaagggccgtggctgtgttccaataaaacttgatttacagacacaggcggtggacctgaatgctgggtggcctaccctgggatgaggtcgctgattttcacctttagtttctgcatgcattccagctgtaagttattcagttgcagctgcacttcacaggttttgaaagtcgtaagctcacaatctgttcaaaacacgttccagtttccactgcgagtcccctcctggatctgtggtgatttgtgagtatgttgctaaacttttcaggagcggagattttctgttatctttttctggtagttttccattgccacatatgtgaaaataacatactctgacttcagtcctttgagatttttgaggttttctttatgaccctgcgttttgtccacgtaggaaggagggtgttctgctgttgctgagcacagtgttcaacagacatcagtcagcttccattccttcactgtgcttttcagatcagtgcaatgctgatttgttcatgcttctaaaatgtaggtaagcaggcttatttttaattcctgagtttttcattatatgctatgattctagaaatgcattaaaagttttttttattgaagatgaaagttattttggcaaaaatatcaattttacattactgaaaactttaataacatataattttgttgtttctttattcttaaaatctagctactccaggaggatgtgttctggtgttgactgttgatcagtatcactccatccccccccacccccccagccctttgcagctaagttgtgtctccttgatggcagatgtcagtttcacggagacgtaattgtttccaggagtattatttctatgcctttttattgttttccactttggaaacatgagttacatgctaggtatccaggtcgtgttcatttggcatccatctctgtcgtcctctccacatcatcatttcccacctcatttgtgtgatgcagttaggcctccatgtggtgactctggttcttgattgttttcatttgactttattgcattttattgtggcattgattctgattactttaacctgcattcaccttccttatcctttcctccattcttttctgagctgatgactccctttcaggtaattctgtttccatggtccctccttctcacctcctcttctcccttcctccctccctccctttgtcccctcctctcctccctcccgcccccctcttgcttccatatgagtgggagacctcgtgttccctcctccctctgcaggccctgtgaggtgcaggattacagggatttaacctgcatgtcttggccttgttgtttgtgcagccctctaagtgctgcaccagcatgacaggcaccacgcctgccacctgcacatgtctgctggggcactgcggacccgtgtcattgccaccctgattcagacgggcggacctgaacctttggttgtttcccgtggtgcggctcgggggtgttctgccaccttgtcaggtggtggaaattggccctttctcctgcatccctaagcgtcagacctcagccgttcccacccaagagaggcggcccacacctgggctgtggctggagcatcttcacggcaccaggagttcactcttcttcgtgccaaggaattggttaattcttctaggatctagcatttttaattatctaactctaatgaggggtttacgtagagggcttcggggattttcagtatggctctctatttgactgagtttgaaggattcctgaaaggaaatcccaagctcctactgtggttttgtcactcttcctagcaggtttaggatgcagtcctacatggctagagatgttagagaaggtctcagtaatatccctgtgaaccccacagagccgccttggtgattctgggaccccctggaggtgacacattcctgagacaccccagggtacacagcaatagcataattaagccccatgctaatgaagtcttttccccagaccttggatcagaatatcacttgttaatattatctgaagttaatgttgatgtatttttggattttcaaagaggtacattttcaaatgaaaaatctaaattgggaaaatgaagaaagtaaaacagaataatgtaattgtaattagggtctactattaagcatttgaaatacatgagatgaaaattagccattttagaagttaaaaatattgccagggtgatggctttttttgttttgtttttgtttttgtttttttttccctattgattcctttggtctttatttcattcagaaaacaattgcctctcacctcctctatccagcctgcgtcaggtactgctgtgtgagtctataaatgctgttacctcctctgtgcagcccacgtcaggtactgctgtgtgttgctataaatgctgttaactctgcattcacattgtagacgtggccctgactgcagggagccaagagagaagtggcttcatgtcatgggcagcgaaacaggggctgtgtgagaggagtgggaatgtgagcttgccccggcccaggccatctgcctgactgtgcagttcatggcttggggccgctctgctcggggcttctttctgtaagtttttcattttgtgtaggtgactttttccagtgctgttgcctagagtgggtaccgttttctgatgagcccacacagaaagaatgcatttcctctcactggaggctcacgacctgccttgtgtctgatgacccacacagaaagaatgcatttccacccactgtggaggctcacaacctgccttgtgtgggtcaggatttttcatggacgtcactagatcagtgtgctgaatgcccatcgagacaaaaatactaattttgagtcagtgtgatgccagaaatgtttttatcaagtagcaggtacaactatttatcagttttaatatgaaaatgttagtcattcatagagatcaaaccatgttgcagaaattcagatttggaagaaacccggaacagtaattgatcttatccattctcctagggttatcatgaaggatttaacagtgtgaacatttccattttctaaggtgaccgtgcctttattttgatggctctgaattgtattttccattcagttgcagcaccagccctcccttgatgtgcagaatgagcaggtgtctttaggagtgaggctggggcacgactgaatgcaaattagcccttgcccagacagaagacagtctcatctcaccagcggtatttcctggagggtctgatctgtcctggacatgcggtgggtcgcggggactgcagcttcatctctcagacggctccttgtccccactgtttcagagtggacacagggagaaggggtgaggcagctgggacccaggcggctcctctggctcccatcttggtgggaagctggtccacaccaccaagagcacggggaggactccctgcggatgggctccagcttcattctgaaggaaggagttgaataagttaaggaaagtggatgagagggagagtgcatgggggagggagggagaggccgcactgtgctgtggggagggagggagggagaggccgcgccgtgctgtggggagggagggagggagaggccgcgccgtgctgtggggagggagggagagggcggcgccccgctgtggggagggagggagagggcggcgccccgctgtggggagggagggagggagagcgcagcgccacgctgtgctgtggggagggagggagagcgtcgcgctgtgctgtggggagggagggagggagagcgcagcgccacgctgtggggagggagggagggagagcacggcgccccgctgtggggagggagggagggagagcgcagcgccacgctgtggggagggagggagggagagcacggcgccccgctgtggggagggagggagggagagcgcagcgccacgctgtggggagggagggagagcgtcgcgctgtgctgtggggcgggagggagagggcggcgccacgctgtggggagggagggagggagagcacggcgccctgctgtggggagggagggagggagagcgcagcgccacgctgtggggagggagggagagcgtcgcgctgtgctgtggggcgggagggagagggcggcgccacgctgtggggagggagagagggagagcacggcgccccgctgtgctgtggggagggagggagagcgtcgcgctgtgctgtggggagggagggagggagagcgcggcgccccgctgtggggagggagggagggagagcgcggggccaccccgtggggagggaggagagggcggcgcagcgctgtgctgcggggaacgatgcatgccgcttcctccaggacctgtgagtgcagggttggacggggctttctgagcttgggagctggggccaggcctgtcctgcaagcagctggcctatttctgctagaagctgtgaattacaactgtaatgtatttattctaaggactaacatggcactattcataaaagactgtgttaatatttgcactgtgctttctgtaattatacctcatcaacttcatttttatctctattctggctgtatttcatattcctgattctcttctgtatgcctgaaaggagagttggtgtattagtcagggttctccagagggacagaattaataggatagacacatgcatgtaaaggggagcatattaagtagtagtaactcacacgttcacaagtgtgaacatagtccgtctgcaagctgaggagcaaggaagccagttcgagtcccaaagctggagtccgatgtgcgagggcaggaagcatccagtgcgggagaaagatgctaagccattctagcctctttatgtttttctgtctactttatattttggctgcactggccctgattagatggtgcccactgaaattaagggtgggtctgtttttcccagtccactgactcaaatgttagtctcctttggcaacaccctcacagacacacccaggatcagtactttgcatccttcagtccaatcaagttgacactcactattaaccatcacaagtggcaaaatataaatgcctctaaatgtgcacaggatctttctatatttaaacaattagtataaagttgcatttcaaaaaaatcttccagctggacaacatggtgagaccccatctctacaaaagatttaaaaaaaattaggtggcatggtggcgcacacctgtagtcccagctactcaggagaattgtttaagccccaggggttgaggctgcagtgagctgagatggcgccactgcactccagcttgggtgacagagggagacactatctcaaaaagacaaaaaataaaaagctttaaaaaattatatttgaattaatataaataacttatatttgtatctgcattcttttctgctcttatcttccttgttcatcagttgttgctgactaagagatatgattgtgtgtcaaaaattagtatttttctaccaacacgtaaatttagagtacagttttttgaaaaaaaaagataatgaatggagatgtatgtcttctcaatgagggtagtgtctctgtcttgtctctgacctttgtgtccacagcatgtggtaaaagtacaggcagagtaggcattggatttttttttaaaaaagcaaacaacacaccagtagtgttaaatgaataaaggacactggaaattatgtgacattgtttctttgaaattctccctgttttcatcttacataatgtttgttttagtgggtttattggcagtattttaatttgctctgtattggattatggacaaatagattgctttccatataattccacaatacctgttactgcatagatgcaaaaatcctagtgtctcctcagctgctgctgtctgcttttgtctgattaaagtttggttgagcagaaggtgaaccctggttgctatttccagtgtcccccacattggggacctgcatgggagtagcatcatccttggctagagggtggagttttcatcagaagtgaccagcctgtctttgtagaggctcatggttcatctcaagcaccatcaaaaacatctggttgtacctaactaatggcacctgtttgtgccacacaagcctgtggcccctaatgaaagtcagatgaactgagcttccctgtgccagagccctccttgaaggctctcattgctgtcactggtccagtgccctctctgagatgggctgctgcacaactgtctccccaggagggagagcaggatggcagccatgggaccacccctgggctccgtcttcaaatgttgccatttgtcttctagctgggctcacttttgggcagcatttccttccttgtcccagttgctgcttcagtagaaaaacaggaaagcaaatacatctttcaccttcgtctttgaactgcattgcccactgtcttgcagtgccctttgcttagctttgccatctgtgcagtttcatttacgagactgaggaaagtgtgttcctggcaatggactcctggcaccttctgccatctcttagagctggagtgaatattctacaaacctgtttttagatttgatcttgagaaggaatgtaggagtttcctgggaaagccaaatatcacaggtccttctcctcctggactgagttttcagctgcaaaagggcaaaaaaaaaaaaataataataatcagtcaagatatctgtgtaaacatttggaagatgatgaagcttctacaatgtgaagtttactagaaggattccacaggttttataaatacaagtgtgttctgagattctaatggaaacttggagtcacaattggatttgaacattttttggaactttaatcttttggatacgtaatttgtaatctttactatttcatctaaatacgtttttttattttataaatttctcttttgtggaattttgaagtataaggaaaaccttgacaatggaaatataaaactccctcaaccctcataactcagagggcataacatgaataatcttagacaaaagttcttaaaatttaatctttacttagagaccattttaaaaaacaatctagaatacattaaagcttaaagatccaaaacaaactgagacatatctgaaaaagtactgggaaggtagatttttccatttaattactacaacataccataaatctatataaactaagacagagttatattggatcaggggtacaaaagttcagtagaatcaaatatagagctcagaaataggagatatataagaaaagtggcatggcagatcactgtggaaataaaatattttatataaagagatggaaagaatggttagccacatgaagtaggattacattttatccctaccttacatcatatcaaaaaaataatacaaactggaatgtactcttacctgcaggccttagtgtaggaaagatgtttaacaccaagactaaaagactttagggataaatgaaaggtttgataaatgtaattacactaaaataaaacatttaaattaaaggaagtaaaaagttacaaactgaaaattacacagaggaaaccaaaggttcactttcaagaaatgaaataacgataccagtgtgaactcagttgtttaatattgatacctatctaatggatatgtaggtattaatacacgtgtgtatgtgtgtactgtgtgtgtgtttggagagagagaagtgcatagatacagagatagaagtgtcctaccgtggagcactgagcagtcctggaaccaaagacaccctctagcatgagaaccccagctcccggctttggattctaaatgcccttcttcttcacaaaagggaaccagggcccctgaggacagtctggctccagcattgtgttaagtataaggttcatctggaagagtgacaggtgtaaagggcagaaaggtcagcctgaaagtgtcccatgggccaagcctcgaataattcaaatatgaacctaagaatgatactaaattataactatttgaatgaaatagtgagtttatactgaaataagtgaataaataaatggaaaagaagaaaaagctgtacttgtagttagatgccaactaacaaattgaaaacaaatgctgaagttataataaaagctatcaatggatttaaaaccagtgggtgaagtcagaccaggagcaggatatgttcacagtcccaatgggtcctcccctgaattatgtataaattacaaaggaaaaaatggtaacattagggtggagaaacttgcgggtccacaacttaaccaagtgatcaaaattaacaccacaaatgagaaggacaacagtgatagaaatgtaaacttgtgaccctcacacaatcacacaaacttcagctgaggaacattccacaaaataactgacccatgtttccaaaaaaaaagagtcaagatcaagaaaggtaaacaaagggtgaaaaggtaagagacatgacagcatagagccgcgtgatcctgggttggacgctggagtggaaagaatgacaaaaggtgaacaggttaaagagatgtgacagcacaaagccgtgtgatcctgggttggacgctggggtggaaagaatgatgataaacatttttaaggcaattaacaaaaatggaatatgtgtattagataatagaaaggtattgtgagatcatgatcaatggggtcacatttctgcacaacttgtgtgcagaagtgctgattgcctttgttccagacaaccttttcaaggatgtttgtgcagcaaacagctttccgaggttgaggaagtgttttgcctctgataaaagggcaggcatgcttattgaacgttgttaaagtttcaaagtttcctacgttcagagtttctcttctgtaatgcaacccaccaggtatacagctgtcaatcatctggccctcttggtgcttcatgggatagcaggctcaagaaatcataaaggaaattgtgggtgctctgtgtcctgctcgtctctgagtaacgaagtcctttagtcctttgtctccaagccaggcatctcatgtcttctgccagcatccatgcgctgttgctggataacgtgttagcttgaacttaggtaaaatcttaaaaccctcacagttcttgtcaggtgtcaatgatcaggtttctgaacttcgtctttggaatggagcaatataaaaatattccattattcttggatattacttggtagtatttaagagcagagataaataaaacaattactaaagaaaaaatgaatatatactataaatctataacaaagaaatatgtatcacaataaaaatgcaaattatacatcagaaaaatggaattagacataagaggcctttcacagaagtaatatgttaataacaaacatgagtgtaatagaggagagaaacacaaatgctacaatgaaggattttcacaccatttgactgaaaataaaaagcttaattagagggagtgtgcactcactggaattatataagttgctggtaggaatataaatggctctacagtaactctgatggccacgtttgtcattgtctcctaaatttgaacatgatcaagcccactctcagccgtgcaccaaggatatacttttgttgttgtctagatggagacatagaaataaaagcacgaaatgataaaagatagggttcagaatcctggcaaccttgggtggatgggagcagaggaatgaagtgggggctatattattagaattagattttttctcatggttttgggtatgacaatgataaagaaatgtcatcaaataactgactaaataaaaacaagctatgcatggatcaatgatcagaaagtgggaaaaatgaagtggggttaatccagtagaaaaaagaaaaataagagatgtaatattgtatctccaaagtgtaacagaattaacagtcattcttcaaataagaaaatgtattgggcaccaactctaccttatgactcttctgtggtacataaaatgttgagttaagcatgattttaagttgatttttgcatgtacaaattttcccttgatttttgtgagttatagagtacttccccttaaaaggaaatgtgaccacattaagcttgaaaattagacttaataaatgtcaacctacacttcatggtgtattcgtaagtgatgtattatataaaatggaaaaaatatgtgtgtgtgcatacacactcacaaacccatatatatacatatacacacatatacatacatacacacacagcttggttacaatgcatatttttgtttctttgcttagtaaaagatctaccacattgtacataacaaatagacatttctactgttcgttgatatgaaataactgtaaaaaacttaattgtccttacactttgtgtttagatgtggcaagtagcaagagactgtagtaaccactgtaaaccatgactacacatagataaactctcagatcatagttctttaaaatctatgcaagagctttctaaaaaagaagcatacttttttttaaaattcgtaaagtataaacccttcctagaggagcagatatccaccggtgatgctgccgggctcctcacagatgagctaaggagaaaccaactggaccttacacaaaactgtgaaaagcagcatttagctgagtggggtgcacagacttcccaggagttgcaaccaaggagcatttgcccaccagcccttcaaagaagcaggaggcatttgcagaagcctgggagtggggcagcagggccgagagaagagttccctctcaggcacagctggctctctccaaaagcaccaggaaggaaagctttcagcaggatggtaaaatgcggtgtaagaataggaaacccagggatgaccctgatgtcagagtgctcctgaagagactggaaaataactatgacccacatgtgtgatttcacaaacagaaagtacaaacaattcaagcagaaaggttattaatgaaaaacatgtcagaaataaataattatgtcattgggcttaactgaagagtggacacaacaaaatactgaaattgaagatagatcaatcacataattcaacagaaacacatgggggaaaagacattgaatcaaaggtgcattaaataaagaaaaaactttcacatttatggataatagcagagtccgacttaagtagattcccagaagaatggaacagaagggatatttgaacatacaatggccacgaatttatgaaatcagtgagagttatcagtacatgtcctgaaaagttcactggaccccaaatagcataaaattaaaacaaaatcatttttgaaagcatataataatcaaactgctgaaagtgagagtaaatagaaaaatcttaaaaacagaagattaaaaagataaaatacttacgtagaaataatttaaaaagacagccaacttcttagaaacaacaggggcgagaagaaaatagaaccatatcttcacagtgctaaaagaaaaaaataatgaacctagaattctgtatctgtgaaagtattcttcaacaatgaacgtgtattagagatccattcaaacagaagtaaaataaaaagattaaacccttaaacagccttgcactgtaaaaaatgttaaaagatgtacttcagactgaaaggaaatgaaagcagatagaaatgtgaactgcagggtgaaatatgaagtgcctgaaattaaatataaaaagcacatatccacatatgtaatttatgtatgttttaatgcattgatatataattatatatatgtatatatactgaaatataattttaagtttatatatataaaaataaagtactacatttgggggcttatagctatgaaaatcatgacagcgtgactatagaggatgggaggagttactaaaattaaattatttgaagattcttacatcgttcatgaagtgatactatatttgatggtagttggtgataggaaaagcttttattctcagctagagaaactgttaggaaattttaagaatctacatgttttagaaaaaacattaaaagtgatgcaatgggatactaagaaatatttgattcattcaaagaagacagaaaagaagaacaaagaatacagtatccaaacagaacacacacggcaaacatggtgaaatcaaatgaaaccagatcaaaacttacctcacaggttaaaggaacaaggacttcagttaaaaagtggggatcaatgacaagacccaactttatgctgtttgcaagaaacacatttaacaaaaagaatgaaagggtttggggaagatactctgtgtcaatactaagcatcaacaacattgtggagcaatttcatatcagacgcggtggattgtgggaaggagattttatgagaaaagtgtgaaaatagccagcttattttcactctgtccgttggttacacgtcagctggagctgtgtagctggagccacacagccatgtgggatgtgggggtgtcagtccagtatgagcttgagaaacagggagtcttcatggagatctgaggcccctgcccactgacttaccaggcactgtgctctgtggccacctgcttttccgggatgcctgtattcagacccttcaccacaaggcatctgacatagtgactgccctctgttctaggtgggtgaccatatagttaattgtctaaaccataaatagtcacagggaacatattcatgattacattgagatgagaggcataattggaatcgcccctggcaactgagaggtgacatcccccaaacctaccccagcacaccctctgagagtgttttggatgaggtcaaacgagtaaatttcttaactattatcaactggatgtttgcttactgcttattttatgaagcacgcattgtattatgagatgatgtttgttatatatgtttacagtttaaatattcaaattattttcaaaggaggcatttttgtttttgttaaaaaattgtatttagcaatacgttgcaaatcatgaactttcttcctaataccatctgttttatgatactctgctcagctttatatatttgaaatttgcagttattttttgtatgtcgtttagctaaatggccatattaaatagatattctggaaagagtcttgtgttgtaggattggtggctttgaattccatgtagattttggcctctgcagagcctctaacaagatgtttggattttggtgagaaactcaccttcgtttggctttggtggtttttgttgccaaatgaagataacttacaggttacaaaaataatcacacaagattatctaaaatgctttatatagcagtcacttaggaaactgtagcaataatgatttcattattagtttggtgcaaaagaaattgtggtttcagaccatgaaattcaaatcattataactaggctcacacacatttttattaatcaaaataggagccattacaagcaatacatttttgccaatagaaataagtttgtttattcctgtggcataaaaatccatgcttcagaatttgacgaactcttagaaagcattttctgcattctgctgggtgtgggaatgttttccctgcaaaacgttgtcaagatggttgaagaagtagttggttggtgagagatcaggtgaatatgacaaatgaggcaaaacttcgcagcccaactcattcaacttttgaagcattggttttgcagtgtacagtcacgtgttgttgtgaagaagaattgggcccttcctgttgatcaatgctggctgcaggcgttgagttctcggtgcgtctcatcgacttgctgggcacacttctcagatgtgatgattttgccgggattcagaaagctgtagtggtcagaccggcacagaccaccggacagtgaccaggagattttcttggtgcaagtttggctttgggaagtgctttggagcttcttgatccagccactgagctggtcatcactggttgtcatataaaatccactttttgtcacacatcacaatctgattgagaaatggttcattgttgcatagaataagagaagacgatgcttcaaaacgacgatttttttttatttttgctcagctcctggggcacccacttatcgagcttcctcacctttctagtttgcttcaaatgctgaatgaccgtagaacggtcgtctttgagttcttcagcagcttctcgtgtggttgtaagaggatcagcttccacgattactctcagttggtcgtcaacttccaatggcgtcgctacgctcctcatcttcaaagctctcatctcctctgcaaaacttcgtgacccagcactgcactgtacgtttgttagctgttcctgggccaaatgcattgttgctgttgcgagttgtctcctctcctttacgacccattttgaactcaaataagaaaatcgctcaaatttgctttttgtctcacatcatttccatagtctaaaataaaacagcaagtagtaagtcactagcaaaaaaaaaaaaaagtgagaaatgcgcactaaaatgttgtgtaacataaccacatttaccgaagaatgtattccagtatcaaatggcaaattccaacaatgcggaaactgctattacttttgcaccaatgggtaatgagataaaatcacttccatttaatgtttataacatcaccggtttatcactatgtcatagttagtacttcacatattctattcaccatacattacaaaaacatatatttacactttttatttgggagagctgattttcatggatcacttatgcttctgtggaactaagcattcacaatcttccatggaaaggataaaatacatatttttttgtaaaatcagttaataacattttagggaaacctaatatcttttttcttaaatgttcttaagcctcttttttaacctccttggtgtttctaaagtgagtcagagaatgagtttatgaagtttgggctcaaagagagcaaggggacccatgacatagtctgtcagcattctcttttcttggagcagcacacgtctcagtatcgaactcaaagaggtaaaacttgagcactggaactaagctatccaactacgtaagggcacccatttatttttcagatggagaaaccaaggctgaggaaattcgagtgaggttatatagcagatcaaatgacccccacccgtaaatcatgcctgggtgcaacacaggcttctgtacgcaaaccccagggacagtgcatcgctttccccgggaggaagtgcaggcttatgggtcccacagtccttggactcccggacctcgggagtggggctagagctttggggtgacacttagatcctctgcacggtgaggacagaagtagcctctgagttggtccttcaggaatcaacaggcattccccgggttcagtctgctgtgtcaacctgagcttatcctcatttctgctaagagatcctattgccttgctttcaactgataattattttacctgtatctttttcaagagtggtcaggcaccaggtatgaagtagctagtgtgtcacccaataatccaaggagggagagtcactttcccacagatcctcacatagcagggcgcccgtaactgtgtcagcaggccttgtttttaaaaattttcttgaaagtcgaggttcaagcagatatagatagaataaaatattcctcggatccgttgagttttctcctaatattggacattcaataggttgtagaaacatgaagcaaattaacacggtttccacagtcgagatggtaacagtggaatggcagagcccagtaaccaggggttacgatctgttattgcagctgctggccctgcatccttcatggcatgatatttccctacaggcatattcttaaaaatatgagtgataaaatgcttaagaaaatcagaaatacattaaaatgcaattagacaggtgttctcatttttatagccattttatattttgtactgtcgcgtattgttggattttagcttcaatattaataacaaaagctcttttgacagttgcttaaaaatccattacatttcatcttaaatttgtatgctgaaagcactgaagaaacacatagcacagaagtttcatgattttattttatatattcagaatggcataaagatagcaataatcaatcttctctaatcagcttgtgacgtactatgtttacagtaattaaaaaggacattcagctttctaatcattcagagaaatgtcacttatgcgccagctgtttgtcactttgtctttgccatggtagggccgtactcattgactagaaatgccagtttttacctccaggctgcttagaacaaagcttaaaaggctgagtaaaaatgtgcatttgaaagacggaatttgtaataacatctctcaaacacgtgtcagtgtcattagctctgtttccagtcacagtgaggaatgtgttgcacatggtttatgatggaaggtgtttattatctcgagtcataaacaacaagtctatgttttggtcttatctctgatattttataagatgctaagcaccttaacacgaaaatcgtgtctgaaagattcatcctgcaagactgtgctgctttgttctgagctgaactcaggcaaatatgccaaaatatatgatgtggggcattaaaatagtccaggcttcttatataaatgaaaaaaattcttatataaatgaaaaaaaaaaaaacctcttgtcttctgatttacattctgaaagtagtccaacctgtgcgtgaaactgaactatattctcattaaaattctggtctaaagcaatgcacgtggattatggaacagggaaagaaaatatccactgaggctaggaaaaaaaaaaaaacaaaaacaggctgggcgcagtggctcatgcctgtaatctcagcactttgggaggcctagacagggagatcacgaggtcaagagatcgagatcatcctggccaacatggtgaaaccctgtctgtactaaaaatacaaaaatttgctgggcaggatgacacgtgcctgtagttccagctactctggaggctgaggcaagagaatcgcttgaacccaggaggcagaggttgcagtgagccgagatcgcaccactgcactgcagcctggcgacagagcaagactccgtctcaaaaaaaataaataaatacaaaacaaaacaaaacaaaaaagcaaccctagaaagctgtctagttgataactcagctcaagagatgtccccgggaactctgggccccttcagcacctcacccaggaatcccgggaagcccactcctcaccgcctaggttccctggacgctcgttcccacagccactgtttctccctccaagtcatttcagaacccgcggccccccacgtgtttctgcagtgacgtcagtgtgcagggggatggagcaaagccagtcaccaccttggagctttttgcgaaaccatcggtgccagtgaagtgatgtcggcaatttctgccagtcagtctgaggggcgggggatggggcaagaggacaggagagcagggagggaattaccctgagcccaccggagaccccacctgactctgacctgtccttcgctctctcttatttcatctcgacaacagttttgacaggtagatgtgggacattgcaattgatgacattgcagctcttcagcaaatggatgtgggctcccgttcagatgccatcacgtcacccaagctgtggaacttctcgaagcttttgttcactcctctgtaaaatgagggtgtttaggaaaaccttactcattagccgttgatgagggttaaatggaataatgctcatgagcttcttagcagagtttccgacataatacatgctactcatattatttttaatgttaatatcgtttcaatgtttgcctcattttccacaagagggaagtccggctcacaaaagctaaatatcttacttacatgcagcagattagaaagtgacacagcagggatttatattcaagtttctctaatgccaaaattaattcataaaatcaaatctatcttgcctcacaatagccgcacgttgagagttacattcatgtttaaggtccggaaaggaagcttcttatcagctctgttgagcctctagtaactggattttactacgataatttctgcagcaagcaggtgaaccgtgacgagggtgtgcagtgcctgctgctggtggagtctgtagtgactgtatttactgtggtattttatactgcagcaagcatgtgatccctgatgagggtgtgcagtgcctgctgctggtgaactggcttgcgtcctgcctctatgtgcatttaacaaatgacattttgtgtcactggggggtggccacattcaatgcgttggcaatactggggggtggccacactcgacgcaggcagtgggactggtgcagaggacacagaagcctcgggtagttttaagtgtttaagtgaaaggaagagtggccattgtctcacttctaccttaaaaactagagaagatctgggtatatacccaaatgactataaatcatgctgctataaagacacatgcacacgtatgtttattgcggcattactcacaatagcaaagacttggaaccaacccaaatgtccaacaatgatagactggattaagaaaatgtggcacatatacaccatggaatactatgcagccataaaaaatgatgagttcatgtcctttgtagggacatggatgaaattggaaaccatcattctcagtaaactatcgcaagaacaaaaaaccaaacaccgcatattctcgctcataggtgggaattgaacaatgagatcacatggacacaggaaggggaatatcacactctggggactgtggtggggtggggggaggggggagggatagcactgggagatatacctaatgctagatgacgagttagtgggtgcagcgcaccagcacggcacatgtatacatatgtaacctgcacaatgtgcacatgtaccctaaaacttaaagtataataataaaaaaaaaaaaactagagaagatcaagcttagtgagggtgtcgtgttgaatgcttagataggcagagagctaggcctcttgcaacaaacaagtagtcaggtggtaaaacaaaggacaattcttgacagaaattaagaagcgctgctccagtgaacacacaaatgataagaaagtgaaaatagtattatttgctgatatggaggaaatttgaatggccaggatagatcaaaccagccacagcattctcttagccagagcctaatccatagcaaggccctaactcttcaattctgtgaaggtctagagaggggaggaagcttcagaaggaaagttggaagctagcggaggtgggtttatgaggttcaaggaaagaagccatcttgacaacataaaagtgcaaggtgaagccacaagtgctgatggagaagctgcagcaagttattctgaagatccagctaagatcattgatgagggtggctacactcaacaatagattttccacgtagatgaaacagccttctattggaagaagacgccatccaggactttcatagctggagaggagaagtcagttcctggctttgaattttcaaaggacaagctgactctctgactctcttattctgggctaatggagtttgtgactttaagttaaagccagtgattttctttttctttttcttttctttttctttttcttttttttttttttttaccattctgaaaatcctagggcccttaagcataatgctaaacctactctgcctgtgctttataaataaaaccacaaagactggatgacagcacatctgttgacagtgtggttgactgaatatttttagcacactgttgtgatccactgagacaaaaagaaaaaaaagatatctttcaaaatattactactcattgacaatatacatggtcacccaagagctctgatggagacatacagggagattgaggctgatttcatgcctgttaatataacatccactctgcaagtcaggaatcaaggtgtagtgttgacttcaagttttattatttaagaaatacatctcataaagttatagccgccatggagagtgattcctctgatggatctgggcaaagtaaattgaaggattcaccattctagatgccactaagtacactaagtacatttcatgattcatgggaggaggtcagaatatcattaacaggacttcggaagatggtgattccagccctcatgggtgactatgagggatttaagacttcagtggagcaggtacctgcagatgtggtagaaatagcaagaaaactagaattagacgcagagcctgcagatgtgactgaattgctgcaatcttattataaaacattaatagattaggaattgcttcccgtggatgagcaaagaaagtagtttcttgagatggaatccactcctagtgaagatgctgtgaacattgctgaaatgacaacagaggatctagaatattccgtgagcttagttgatgacacagtggcagggtttaagaggtttgacctcaattttgaaagaagttgtactgtgtgtaaaattctaccaaacagcatcaaatgctacagagaaatctttcatgaaaggaagagttaatctatgtggcacacttcaatgttgtcttattttaagaaattaccacagccatttcaaccttcagcagccaccatcttgatccgtcagcctacaacaacgaggcaaggttctccaccagcaaaatgattacaacccagccaaggctcagatgattgttaacatttttagcaataaagtatttttttaattaaggtatatacattgttttatacgtaatgctattccacacttaatagactacagtatactgtaaacataacttttatatgcactgggaaaccaaaaaactgtgtgacttgcattatcgcaatatccacttgattagggtggtctagaaccaaacctgtgatatctttgaggttgcttgttcttctttcacacacactacataggaaagtagtcatttaagtagatgtaataacattatatccaatgttccctattattgaacattaaaaccttttttcccttaaatgtttttggctgttgaaattataagtttatgtaattgcttttgtggttagggtgaagttgcatgatgaaaactttgcattcttttcattaacaaatagttaaatggttatatgttaaaagcgtgtctcagtatttaatatgcctattttgtagaaagagggaattttaaaaagatatttttcctgagaaaatttttaatggtgtctataaaacctatttttctttagctcgtatgtggctgttgaaccttaattttgacaagataaagatgttggatggactctcaatattgatatgtgggttcaaaaggaaaccgcccagataggttcccagactcagtaagtggctggtgtttgagcatagccaggtggaaaggaccagggtgaagacacggggaggactctggtctccagccttgctgcctcccggcagctgcagtgtagcccctctgtgcatgtgtgaccctcgtctgcccgggggaatgctcagacatgccctgctcaggggtaggaacactgccaagtagcccttttcagactgtaaatcactgtgacctccttggctgagatgatgcgtttctcccctgacattctttttgatctaaatctactaaggtaagcctgctaaagggagcacactcctgggaaactggaaggaaggaagtgatgtggttcagtgtgcagttttcaggaatatttataaaatcttaattaaaacaggtagaataaacagtggtctttacattgagggagaattttcctaagttttgagaaatttgataaaggtattgttaagtaatcagcatttcaattctataaaaatgaaaagataagactattttgtaattcgttgcattttacctgatgaatttaattcattcacccctaagattcaaagcttactctgtatctgacattaaacacacctcctacaatttatacaccttataactttttctggaaatgtttgcctaggagtaaacaaagtattaaattataaagcaactcaagggaaattatcaaatgttgaattagcagaacctaaaaaaatgtaatgactataataggctcaagttattttttaaacaagtctatgttaagtaatactatcctaagagaaacaatagtttttaggaatgtatccatttgattcacatggcactgtgaagtttttgaatcagttttacgtgtgtaatctaatttaattattatttcactgcgatgttggtccaagaatcagattttatcattttaagtaaaaaatccataaaataatcatggaatcatatctgactatacagaatggaccatagagatccaatattctcctcattacaggtgccaagaataatgcacataaaagagtaataacttagccaaagtcacataactaagaaaaatggatcagatgagggttggagtataattaaacagacacatgtgtgcatgtttttaagtggagaagtgctcactgagtccccagcctgtcctaggcactgttggcctcttgggatgcaaagtgagtggggacgacctgagtggcagctcctacgtcctttgcagctaccacacattgcagggctgagctgtggccaccagcaagtctcagccaaagaccctgcttttatggggacttcattttatgtctctaaacttcaaactcttaactttgatgggcagaatattatccatttttccaatggaaagtgtttgtcattgttcattggaagaaaatgtggaaagtgtttgtcattgttcactgaaagaaaatgcatgctcaggtttctgctttcatttaaccttccaagggcagctgtcattgtttctatgtagatcttagtgggacactaactgagtggcgttcgtttttcttcttatccgaattgttttggtttatatctaaaactaggagtgtggattttcctcactcaaatgacatttgctgatagattacttgttgatgtcttcattctttctgtttgttggatatgctgctggattaagagagtttatttttctttcttgtgccaaaaaatggtttcatttgtactaacatgaaaatatccataaagataacctgccagaaaaatgactgaattgtattggaccactgctgttctgtgacaggttctctgttaggaactttcacaaataccgtctcatttacccatttgcgtgtctgaataaagttgcaattatctccttttacagatcaggaagcagaggcacagagcggtgaggcagattgcacgcctgtgtgtaggcagcacgtggcagacgtcgtcggacgtgtctgtggctcgctccacctcctccaggggcttatgttctacatatgactaaagtcattggtcacgcaaaaatcttcaatgccagttataccaccagtatacagatgtatttccatacaaccttcaatctttggtagacccagttgaccaagtcagaaggcacagtattagaagtttagaattcttgataaccaagcacttcttacagctcccttagctgttaacttctagaaactgggctaaattggaagtctgttccttccttccacccgtatggcccagtaatttgcgtggttagtttctcctccccgtgcctcttcctggctctttacgcttcttccagcacctgatatgcattcactgattctctcaatgccagcgattcagggaaggaaatatactgacttctggataaacaaggggcaatgctttataacaacttgcatacatttttgtcacactttgaatctatagaatagcaataattatttggtgagtgttatgctgtgtgatactttatgtcaagtatattctgttttagaatagccttctctgtttgaatctgctagaaggcatcagtgtgctatgcttccaacaaagacatacgagaatgatctcagcagagatgcactcagctgcataaataaattaaaaagcagtaaaataggtaaatttagtatttatgattattctaaattattaagaaactcaccttaaattttatgaaggtaaatcaactttagtaacaaaaatcaggacttaataaaaaaattgaccttcatagatttaaataatcaataataaataatgcattttcataattttaaaattataaacatttgcataaattattaatgttttgaaaccctattctgagtcttctccatgctatgtttacatgtatatatgtacatgctatatttacatgtatgtacgtacgtaattcttaatatattagtttttatcatactcttctgcttttcacacatgcttgttatttttggactccttatcaacagatgctgaactaaatatttttagcagcttctcagtatcacctataaatcataatgcactttaaaatgaaaggtgtgaaatgaacaccttgcccgccactctcagtgccaagtctgattgtatgtttaggatgaattcttagaagtaaaaatgccacattaaaaccgaggcctagtcaacgttcacatctgtttctgagtgttttctgggaacattctgtgcgttcacacacacctgccaacaccatatggacgtccatgtccgcacgtctttgctggtgtgcggtgttgctattccttttaaacatttacctgcctggtagtttaaaattcttaatgttgtagtgactgtggttttttcatggctagtgaggttgcatgtattttcacatttataattcattttcttttctttctccttttgggaatgacttttatattccctgctcaattttcacagggtgctcgtgtttcctcatgtgaggctccatgaaccccgggtctgcggcacgcatttagtttcgaatatggtatttttgttacagaaaggttttttatttctatgtaatgaatccttcactcaagaacttctggcttttgagtcacactaacccaatatgcttacacacatccccgcacacaaacacacacacactgatatttcctcacaggtttttattttgtttttctacatccctgtgactgttgatctctctggaacgaactttgtgaaatgaggcatatgacacccatgtttacagttatcaaagcattactacattgagcagtagtctgaagatctttctccgtaggaatgttttttgtttttttttctccagggatgtcatacaccctacaggtacccgagacctcctggtgctgacgcgggttcacggccctcactgttttgcggctgctgtggcatcgtggtggattttatgttttcatgtctctctgtagcaggtccttttctctgcagctgtcttatttcattaaacacattgttagaattgtaaggctacacttcaaagttgtctgtactggatttttattggaactgcatggataaagttacaagggtggaagtaggcttcctgtggcattccgtttgagaactgtcttgtgcccctcggatatgccaggctgggctgtagaagctggtccccctgaagtggagaaggtagagaggacccttccatcatggaactcatgctctgttgtcaagcggcacatgggttctgagaagttctagggagaaagataaagctgggaagaggtatgaagagcagtggggatggcggagttccgattttaactggtcagttagggaagctgccgaggaggggactctcagcccagaccccaggacatgaggatgccaggagaggagtgggtggggcaggtggacagaccccaggcaggtatggcaggattgcaggacagctgggcagggcaggtggatgggccccaggcaggcacggcggcgctgcaggacagctggacaggggacagggagagactgcaggtgccggcctcacagggcatcaccggacactggcttttcctttgagaaatggcaaactttggggagattttgttcagagaatgatgttacctgaaccgtattttaacagggccgcccagctgtgaccttaagaatacactgaactgggacaaggctggaaacagggaggtcttttatgaggccagtaaagcagctttgaaggcaactgaaccccgtgaccccaggcagagggagagacatttcaggggatttgctggtgagttggacactgagggtcaggagggaggaaggtcacaggaactgaggagtttcaaccaagacagcagggtgatgccgttgccacccactggggttgggggaatcgttggatgagaaggggttttgcttttgtttttaaatatttttatttgttttgaatgggaaagactcaaagtttacttttgaagaagttgagttggaataactattttatttccaagaaatgtgtcaaggaaatgtattcaattagctcattaaatacccagaatcacttaagcagtgggaaatgtgggccttggagaaggcaggacccagcggaacccgcgtcccctctccttgcttttattcctcctggtgagtgacctgctgttatctcagcacctctgtgcccaggctgtccacagaggttttcctggagggctacaggtgatgtctccagggcacaggaaggggcacagaaagcagtgcctggagggcatattactgcatattacggcaaataattctctctggaaaactaaggccaatttgacataatgtgtgttagtatagaagaaagggattagcataaattgcaactttgatttggaacgcctaattacctctaatctggttgtgttcctgactttagttttttaacattttgagcagaagttaggtttatttcagatggcatcatctggttcgcacggtgtaataaaacaacagatgatctattagaggtctttgttgaatcttatttgctttccttagctagcatttaaaattttatatatttaaaatactatgttttatttgttaaagctcggcacacccttcccgtgtcctcggtcatggaaactgttctctgtggacaccaagttcagtgttttccattcctagatccctgggttgcaggcaatgtcctcaccaggacaattaaccggtagcaatggtgagtggtcagcgtgatgaattagttggaagttaatatcctatgtgagtgtggactttacatcaagatataacatcgatcaatatcacatctttttgatgtgaactaaaaactgttcttgtcctgaataacgagagcagagcaagcccttcctccgaaggcggctgcactacctgagcttctctgggagtggcccactgctcactgtggacgctgctcaccacgcatctgccacttggggtctctgcaccctgttccgggtcctgctccttattagtgccgcccctgaggtcctccatgagagccccacgggtcccccagggcggtggcgagggggacttgtcctgggcaatggtgtggctgggggacaagcgatggcttagtgaaagtctgcagcaagaatgtgctcagatgcatcggtcactgggggatctggagaaattaggctagccagagctcctattgctagggagattcctaggtcatcatggagaaagcctgtttagcaggatgatatggcctctgtatgcactcagagtgagtgcgtccttccagacactgcctgtgacttatttttataggaatttgacttttactttgagttttgggttccaactttacaactccaggcttggtctgtatcagctaaaacttttattcatgtgctgacctcagcatattgatacacttgctcttctgtggtgtgtatgtgcctatgtgtatgtgtgtgcatgcatttgtgtgtgtctgtgtgcccgtgtttgtgtctgtgtgtgtgcatgcatccctgtatgtgtgtgcatgagtgtttgggcatgtgtggaggtatgcatgtaggccatgtgtgttgcatgtgtgtgtgtgtctgtgtgcccgtgtttgtgtctgtgtgtgtgcatgcatccctgtatgtgtgtgcatgagtgtttgggcatgtgtggaggtatgcatgtgggccatgtgtgttgcatgtgggtgtgtgtgcaggtggtttataggatgtgggaggggaggttggaagttggaagaggcatggctgcttcctgggtggtggcatgagaaaggtctggatgctataaaagcagcaggtgtttgtgtttttgggtggcctaggtcaacaattaaggacatacttctgagctccattctgcaggaatcattaccgagaacgctggtggcccttccttttctcagagcctgagagctgtcagtcatagtaactggcagggagcgtgagaaccatggccccaggagaagcaaggagagagactgggacctgggacctctcccaagcctcagggcccttctcttttacggcaaacaggttgactttccgcaggccacggcgtcctgaggaagccccatcgctcagcccctcccattgtcaagcccacacgcctgggctaggggctcagtgcttgcagccctgtggcggagctggccttgcctccctctgtgtgcagcggagtgggggatgcccacttgtcatcaggcgcccgtgtgtgagagtaaatgcgggaggcaatggtgagatatcctcacaggtgtggtgagaacgcacatcaaagtcaggcagggagctgcgggcacctacgtttcatcctgtttcatgctggttagctagaattctgttttcccagtcgagtgttcacttataagagttacacgttacacacactcatggggaaatactgaggagggtcttcctgcccttagggatatgtctacatttcttcatctctccagtgagctcagccctcggtcaggcagggccagcagtcaggctgcaaagggccagggggcctgggtccagccacaccccatgcacctgggacatagccagggcctccttcccggctgcccttggtgcctccacaggcactgccccttccagagagctggtggatccacagacgtcccgtgagctcccagagccgtggcagcactcccagttccagcacccacccggtctggcaatctcacccgtgtacagccccctggggtcagcgaagtgggtgggagcacacagtgcccacagggatgggaagaaaccattagagttcccattgggtgcagttttacttatgctgggtgaggtgtggattgcagtggccggtccctgggctgccagccagatagtcacgtgtgacagtgtgtgtgagcacagtcctgcatgtgtggttgttaaattaccagatgcaatgcagtggggcacacactcttttttgtgctgtgttgagtgattgaaagccagaggaaaccacttggaaccctcctgaaactctcctgtgcgtggggatcagctgaggatgttgggaggagcagattctggcttggttggcagcttccctcggcgatggtctgtggttcccatgagtgctgaggaggcctccactgtggaaacaagcccaacaagcccttcctaccgcactgtgctacttaatggaggcatttgatgagctggttttctaaatccttttgctatttgatgagctggttttttaaatccttttgctatttgatgagttggttttttaaatccttttgctcagcctggatcttacctgatgaactccggatctctggggcagacgcaggcgctggggctccttgaaccccctgtttggttctcacagcagctgagttgcagagctgcagggtcctatgtggccacagcctcatccttcacacgtggggacctccccgtccgtgggccaggctctgccctcatgtatggctctgaatgtgagggttgattagcactggggctctaggcagagaggatggtggagtctcagccctccttgctgggccactggcctccagctgtgcccatccctctcccccgccacgtggcatgaggaccaagtgccctggctgccacccctgctcctgcactccggaggctgggtcccgacaaggcactgggcatgtggccgggcataactgctatcctgtgggacgcccaagccctgtgcctgaccggcggcctgctctggagcccccagggtggctttccctgactctcccggaggaggaggcaacgtttctaatgatccaaaggtgtctttctgaactgtctttccttcatctgctgacaaagctgatagatttatcttctttgactaattaaacttccctcctgatcaatacttcctagcaattccacattgtgttgcttgctgtccaggaacaacaggcctggcctgttccccagctcccaagacacagcagcagcccctgcaggagcttgggccacgcccacctgctcccttctgagaaggccgcttcctcctcggctgtcgttacttccaatgtgttcctttcctactccaggccaacaaaccttcacacagatattttatgaatcttaaaaactatcatttttattcaaataactttagttaaactaaaaaaatatatatatatatatttggaagtgggaaaaattattaaaataaaatactataaaacttcacaagttaaaaaaaaaacaaacgcctggctaattttcttttaaaaacatgccttatataaatcctacaaaaacggctcaggaacaattattcaacattttattattttttgcataaatgaatcaaatccttatcggttgagcacagatctgtgcacacgcgagcactacacgtgcattttaggattgtcttgagcaggaggcgtgcgtcacctatccccacccctggctcctgccctcacaccatttttttgtgtttccactttgtccctacagacgaaaaccactattgctctgttgtatgatgaagagtccgaaaatgcctatgacatccggctgaagctgacgaaagaggtgctgacaattcagaaacaagatgttgtctgtgtgggcggaagccaccagggcaggaatgtaagtgccatcacttcagggaagtcttggagtgtttcggacgagccccatgaacggtctttgaaaagtgtggttcaagaatgattgctgagcaaaagctgctactcgttatttaaatatccccaactactggctttcactgtgtcacaaaatacagtttttaaggttgtattatttactctctccctgactttcttatttgccaatacattttccatgtaaagctttacgtaaaaaatagccccaatcctggcgtgtgcctgtaatcccagctactcggaagtccgaggcaggggaatcacttgaatccaggaggcggaggtttcagtgagccaagatcgcaccactgcactccagcctgggcaatagagcgaggctccatctcaaaaaaaaaaggaaaaaaagaaaaagaaatacccccaaaagccaccatgtgagatgtggaatgttttcagtgtgtttttgaaaatattccaaaaaccatttccattcctacgttctaggctggccctttctgggggcacaggcttaggagaccctgtgtctatttggttttctgagtcctcctgtcctttaccttggaaataaaatgaagggggcatttccccccttactcgcaatcctgtgatcagtgtttctgaaagaggtgcagatgttagcaaagtatgacgggtttcccgagaaggtccacaaagatcccaccgtaaaccgttctgctgttgatgtgtatcgtgtacaagtggctcctgtgaacatcctggctcacaccttcagtttggagcccctccttctgtggctggcacccggtccgccctcctgctccccaacatgtcccctgtggctcaaggaggcgaaggctctgggatgggggcagggtccccctttcagttgctcttccctggaaccccagccccagaaccacatcccaccacgtgccctcttcgttctggctccaggactgcatctgtcttcgtctgtttgagttgctgtaacaaaatccccaagctgggtaatttacaaagaacagaaatgcattgctcacagttctggaggctcagagcacaggatcaaggtgcccgcaggctgggtggtctggtgagggtctgctctctttccagacagcgccttgaatgctgcatcctccagagaggacgatcactgtgtccttgggtggcgggaggaggaaggggtgagatctctccgccaagctttcgtgtgagggcacctgaccccattcatgagctcacagccctcatggctcagtcacctcccacagcccacaccccggcaccactgccctgggtagtaagtttccacgtgagctttgggggagacacagacatcccaaccacggcctctgcgttcaagaggccactgtcggtcttcacgggctcatacaagattcccacaaccctgaggctttttttccccgacatgtagataaatcgcatgtctgcttttatgtcgtctaatcactaaccattattttttttcctccacttgttctaaatacctaataagagtgggcttgagcaaagaaaaaaatcaaggaagctttcgtaatcattttaaacttaccctgcttaatagagatttttaactatagaaaatctcaaagtaaaaacactaaatgtttttatgctgtattggctagaaaaaaataaattacattttaaaagtctatagcatcaggttctctaccaaaagttaggttattggtgaaaatgaaagactccttaagaaaaatgggcctatgctcataggtatagacttatgcgtacagttttaggtgaattattgactccaaacctctagttatatttgtattcccacctgcacattggagaagacaacattaacggatagatgtgtgttttgttttcttgaacctgctgaaaatagaaccacattatccgttaatgatagatgaccataaaacaaaaaagagcaaaactagctttacctttaacaaagccaacaggtctctaaattctgtccgtgtatccagcagtgcagaatctgaattgatgtattattttacttcctattcctttatagtgacatgaagtgtcgatgtttaaggatctcaggattctgtctcccagagacagtgtgggctttcaggacgggagagccggcttcctcttacctttcagaatttccatttagattgctttatttcttttataattgtcattgtgcattagatgttcttttaatttataagtccatgttggtactttgaattaatggggtgggatgctgtatattacacttgttatgttaggtcacggtagatttgcagttggaaagtattttagaaaatttcacatcttcattttactatttaggaaattaagattcaggaagaagaaggtatgcgtctaatattacagttactcacatagttaagacagcaatgggcacagctctgctaatttataatctaagggatgctctctgataagttagtgaagaccacacaagaaacagacaaccacaagcagcaccaacacaaacagtgctgggtgactattaaaatagtgtgagtttagagagggcttcaatcacggaaactggtgtgaggtgatttaacctgtgcatcaggggacagcccaggggctgagccagagaggaagacacgggctcgctctctcgctctctctgtctctctctctcctgcatagaagcagaaagcccaaaaagtcagatcttctgtgagtgaacttgaaaaacaatctgtcccttagaaagggacagtcagaacattcacctggaagagagacaaagacacaaatcccgaaggatcccaaccccacatctgccctcatgggggtttggtgctgagatttatgacatagaaaccaccagcagaaaatgaagtttaatgtttcagatttggaggttccccaggtacgaagtagaagcaaaatgcacattctctccagcacaatctactctaatgaaggcctcaggccactgccaagtgtaaggtcacaggaccctgtggagatcctaaaattatttgttaatgcagaaacggactcactgacaattcaggttaaaaatgatctgattcacaatataaagtacttggatttattatgtttcaaaacatgaaataggatatataaatatgaaaaaggaacaaggggctataaaaagtcatccagcagatgtgaaaacacaccaagataatatctagaaattaaaatagaaacaatacctgaaatgaacctccatgaacaatttaaataacgtgttaggtaccaatgagaagcatgaagtataaacagagctgaagaaatgacacagaatggagcacagagagctgggaaacatggagggaaatgggcctggagagtggcctggggttgctgacatttgaggaatccggggtgctaaggagcagaaggagggtggcaggaaacggaggtcaaggaggcagggctgacaagtctacgtaagtgctggcagatagcagccctcaggtttagatggccgacagatagcaggaggggtaaataaaaagacagcggcacttccttctggtgatgcgcacctgctgttgtgcacacctgctcttgtcctcatggctgtgctggcctcatgaagagtttggagggctttcctctctttcttcttcccagaagagttcgtgtagcatggctgttctgtctgtcctataggaaggctttgtcagggtaatgtaagtctgtagacttaactatcagaattcaaagtacatcgtgctctagccctgacctaacctcttactgttcccgggtaaatgcaggttaggccactggccacactctgctgatgctgcagtatgtgatattgactttgccactctgttagactatatgtagcttaacatcaaagaccatggtgttttcttctgtttcctatatgtatctttacaactgtgcaaatgagactaaagccatttttgaatgattgagcgcataagtaaataaaaagacatattttagaatatgcaaattaagaccattaaataacgtatggtaatgtactaatcgagtcagtctcaagcctttgagccttcaaaaggcaggcaattacagtggtccactgagcttgtgaaaatcatttttaaaatgtaggtgtattgcttctataacaaccaacgtgaaggaaacccaagatctgtgatttgaatttgaattgaagaagttaaagtctctcagattgttgaatggatcatcacacttgcaagcgtgtaggagtttatgataaattctatacacaatatacaaaattctacacttgcttgtcatacagtcaatatttcatggctactttatctaaatttatatctatatttcacacccaagttgcttcttattctttgggtccaaaatcaggagtagacatcgcttctgctttacttttttaaattctaaccttaatctttattattttatgtccttaaattaggcaaatgaccaatttcccttacaatattttataattcagccaaaatacaagtaatttaataggaacccttttaagctaattggacactttatcagcattatgtatttttctgttgataactttattgacaaacatttattagtttgttaactcttccatttttctcagatcccaacacagaatctgtttctttccagtttctgaaaaccagtttctgtgtgcttcttcatgcactgagtcagctctgatgcctgtgtgtgtcgcctaacctgtctttcttggttgggtcccactccgcctggcacccctggtcctgctcagggcatgtgagctctcattagtccattaggggaaggtctgatggacacctcggcctgtgctccacagagctcatcagtgtagagcaaacatgcatgtttacaaatggaatactgcataagaagaattggctactgttcctagaaagtagaaaacagaaagcaaaacaactgcattcggagctttcatttgtcagtgactcacccaccagtggaagaatcatataagctcattagagtgtgtccatagtcaaactgtaatatgaattcttccctcgttatgttctatcccagggcctaccagatgtcttgctgattgcctggctggctttaagtgggaggatatccttcttacgaaaatcactaactacacttctgtaaggcatccattcttgtttgaaattgatttctcttgtgtttaaaatggccactggcctttttcttggatgaatttatttccaaaagatttgtctccacagcggaggatggcatggcgaggcagtatgattggaacataaacaaactgtaagacacaaagtgctgggaaaagtgcagataaatttggaagcaagtgatttgtgaaatttcacaggtacggggctgaaggctgcaaggatgaaccagggctttgaaattcataccttcaggagaaaagtggacagtcttgctgaaaaggcttctgaaacaattaacaaaatgcagtcgtcagcaaaacatctagaatttatctgtcatcacttggatagtggccgactcttacaaaatttaccttcaccttaattttcaacactattgagttagctcattaaaatgttatttaatggtacccagaatagggttcactttaataaggaaagttctggtttaaagaatatgaaaaccttaaaataatgaacagtttggccgtattcattataaaagtttacaccaaggtttagttaaaaataatagtttacactttgggagtctgaggcaggaggatcacaaggttaggagtttgagaccagcctgaccaacatggtgaaaccccgtttctactaaaaatacaaaaattagtcgggtgtgatggcagctccctgtaatcccagctactcaggaggctgaagcaagagaatcacttgaacccaagaggtagagcttgcagtgagccgagattgtgccattgcactccaacctgggtgacagagcgaaactccgtctcaaaataataataataatagtttacatatgtttgtgtacgagggtgtgtgcacacaaaagcacactttataaagaaatcaaatagcgcgtcactcaagtagaactttcaataactaaaatctaacagcaaagacagttgcataatctgccaaacatttttatttttttaagtatataatttttcaaacctaaaaaaattgaagtgagcaaacagaaccctgtgcaattattattaatatttattatatgccaacatagcactagattgctttggctctgtctacgttattaaagagtgaagtgtgcctccacatctggagcctgactgcttcctcactggcctttcggtactgatgctcctaccgactgttccatttacatttttaaattcttccttcatacgcatttttccacagacaacatattttttgtgtgtttttcaattgtagataaatggaatgccattaggtgctcattttgcaaacgttatgctttttaaatggatctacaatgcatgaagataaaacctgctccatgtagatctacttagtccattcctttaaggactatgagttgttatatgaactgtccaaagttgataagttttctgcacattcttagttggatgtaagtccccacaagaaaaatttatattttcaatattaccaacatatttattttaataagcctaactttgcaatgatgtgtacattcgctagaagttaatctggggctcatatgtggtgagttcttgttaccagctgtgaatccacaaccgtctgcagcaaacttgattcttgcttccttggaggaaagaactgggttgaggggcagaaagaggtttaagtcagagggagagagtgaggccagttttagagcaggagtgaaagtttattaaaaagttttagagcaggaatgaaaggaagtgaaggacatttgcaagggccggtgggtgacttgagagatcaagagccccatccagcccttgacttggggttttctccattgacatggttccaaggtttgcagccccccttccctgattcttccttcggggtgggctgtctgcatgtacagggccggccagcatttgggaggggccgcatgcactgtgtgtttcctggggctgtgcacatgttcacttgaggcgtttttccctcaccagttgagtccacccagaggaaagtcatagaccagttaaataccacccttttgtcttgaagtgtgcatgcttgaggccacttgcccagctcctgagatcttatcgggaagctgcttatctccagcctcaggtgttttctatctaccgggagactgccttttcctggtactggctgtgcccaatgatcattttagagagaaagtgtaacaaccacctgaccaccacctgatggtcgcctgacgttctggggctggggcccatctcctgccctgttcatgtctgctctgtgatatggttgtgaagagcgaagttgaagggcgatgacaggcccattcgcatctgtgactaatcttggtgggtgcccagctgactggcaagagcagtgctgccaggtgtggagctggcaggtgagaggcagctgacatggacagacacccctgctcctcatcacctgccctgatagtgcaggccaggctgaccaggaaagctgccagccccaggtccctggaccacttgggacagctcccctggagggccaggcccatcagtacaggggctgggggaggacagcttagggtggaaaagccctggaagctaattcagaggagaagagcatcttcaggttcctcctgtaccccatcagggatcgaggcaggggctccagatggaccagagactctgatgccaggacgcaaacatcataaggtcatggcggccgggggcctggttcctgactgcagctcccagagaccccagtgcactgtccccgcatcaggttagggctacggggccgctcccccatgaagcccgccaagggcagcttttgtcattcctggcctgtgcttagacctgaagaaactcatactcagggctttgggtgtgagaagccagatccaactcctcaagaaggtggaatactatggaatcattgaatttttaaaatttaggagttatcatacacttttcaaaactctaatcccaggatattgaaatccttctaataaggatttaacatccaaattaagcaaatatgcacaagagttttcaagtaactcttcttagtttgaaatcattgcatccagacactgagaaatagtttacttacttcagatggcaaatccaggctccctcagcctatttaggaaattttatttgagtgaattacttttaaaaagtggagagagattcaatgccccattctgaaaaatgccttatagagtgtttgctaaagcaaagggaatgtccaactctgtggaagaaacaatgcctcctgactcaacagccccctcacatagccccagggcgaagtctgttagcacattgttttctgaaataaaactctatgagtatttttgaaagtatctttcatgtgtgggtgtgaaatagaatacttcagaattgtttttctataaatttctaatttttaaaatttaactttcaagcccttcaattagagagagaaaaaaaaacccttattttctaggtccctcgcctttcccacatctccattctctccttacaagagtgaggccaggcctgtgtgaggagtaagacctccagggaagggagggggatcgacgaggacctggggagagagcagggggattaacaccccaggtcatcctgtcctcaccacaagaagggttttgggctgaacaaacctgggggcagggtcctggctggtggccatggtacaggcgcagtgttttacctgtagaactgattgaaatctttctggaaactgcagtattaaaatctgaacatgagtttgcagccataacaaatttaaatttagtgttaagtccacagtttaaatatctgaagtagaattgtgaggcccattcatacatgtaattcagtaataacttgaagaacaatgttttagaagaccagaataagaaatatgatcttatatacccccaaaccacttttttgttgatgagaaatgtataattgataagttatctatgtcatagaaaatagctcgttcttaaaatatgtggtcagaagataatgtggagatagctatgttctattattaatataatgatgctgctaccaagatgtgaacattaattaaatgtcataacatagtttgggattaaatgataaaatgcagaataatattttatgaaagattttatctgatatgtttgtgaaaagaaaagcaggattgactttgaaaataatttattgaacaattaccttagattgcaacctccattctgtagaagttttatgatacattcgattgtattctgaatttgttcctttggtgagtccctggagcccctgagtatggtaagtgaggaggccgtgattatgggggaacgcatggaataggggagtcaggccataaattagattcataatgagcctcggggcagctcacgatccgcacctgcttgtgggtccttgactttaaggggtatgtactgggagagcattgaggcagcggactgttttggttgcattagaaatgccttttgatgacattagtttgtctagatatcagctaacagagcactatggaaatgctacccagaaccttaaattaaagtgatcagctgtgggttgcctctggggtcataaaataattaggatgcaggaggcaggataacttcagccaggctgctgtgtgaaaagttccagttagaagctgcagaagttttcctgtttactttttatcatccagtaagttttataaatcttggtttgaaaagtaaagttcctagatatgctaatgttaaaatgttagagccttcataattatataatgttcatttctaaaagtgtgaaaacacaaattggctgagccttttctctcaactttgacacactgaagtcctggtgtttgaatgaggtggttttaaaataacgatttttcatggataaaactaaccaccttggtatttttgttaaacctgatggtctgtaaggtgctttccacagtgatcttccttcactcctgttgaggcagcttgggctccaccgtaataaggaaccacaggtgggctggcttaggcagcagggactcccttctcaccgttctgggaggtggaagtccaacaccaaggtgctgtgggtttggttactggcaagggctgccttcctggcttgcaggcgaaggccttataggtgtgtcctcatatggtagagttactggcaagggctggcttcctggactgcaggcgaaggccttataggtgtgtcctcatatggtagagttactggcaagggccagcttcctggcttgcaggcgaaggccttataggtgtgtcctcatatggtagagttactggcaaagggctgccttcctggcttgcaggcgaaggccttataggtgtgtcctcatatggtagagttactggcaagggccagcttcctggcctgcaggcaaaggccttataggtgtgtcctcatatggtagagttactggcaagggccagcttcctggcctgcaggcaaaggccttataggtgtgtcctcatatggtagagttactggcaagggccggcttcctggactgcaggcgaaggccttataggtgtgtcctcatatggtagagttactggcaagggctggcttcctggactgcaggcgaaggccttgtaggtgtgtcctcatatggtagagttactggcaagggccagcttcctggcctgcaggcaaaggccttataggtgtgtcctcatatggtagagttactggcaagggctggcttcctggactgcaggcgaaggccttataggtgtgtcctcatatggtagagttactggcaagggccggcttcctggactgcaggcgaaggccttataggtgtgtcctcatatggtagagttactggcaagggctggcttcctggactgcaggcgaaggccttataggtgtgtcctcatatggtagagttactggcaagggctggcttcctggactgcaggcgaaggccttataggtgtgtcctcatatggtagagttactggcaagggccagcttactggcctgcaggcaaaggccttataggtgtgtcctcatgtggtagagttactggcaagggctggcttcctgggctgcaggcgaaggccttataggtgtgtcctcatatggtagagttactggcaagggctggcttcctggactgcaggcgaaggccttataggtgtgtcctcatatggtagagttactggcaagggccagcttcctggcctgcaggcaaaggccttatatgtgtgtcctcacatggtagagacagcgaggtgggggtggggagagaaagagcaagagagaaaaaagagaaaaaaaaagagagagagagagcgctgtatctgctgtcttttcctgttccaaccctatcagatagggcccacctgaatgacctcatctgaccttagttacctcctacaggccctacctccaatgcagtcacactggaggtcaggacttcaacacggattttagggggacacagtcccattcccagcacttcctattagggctcacagtacagctctcactttccagatgcagaaacttgattttagagagatttagagacctaaatacctaaatggctagtacaaatgtacacagaaaggaacatttcaagagactgcacaaagcaggtatgaaataaatattattctggcttagctaaaatcatagagaacaagcccttcacattccagtaaacatatatttatgttggttgttaatggtgtaatttttttcttacctatcttgttaagaatattagtccagattttaccacaggtgatcagtttcttgatattttctttgaaatatcaaggatattttagggtatttcaggatatcttcctgacatgtataagtgagtcaaatgacagttttaaaatgtcattctttggcagtctatcaaggcagaaactaacttgtttcttctcaaaatgtattttctctcgtcttgtacttgcttgcatgagtttcaaatacttacactaacagctacaattttaaaatgttattgagcattttcagaaattccatacagagaggcctccagttactatgacgtagataattcaattttctcatcctccatagccttagaactcagaagcgtaaggctgtttgctgtggcacacagaggagcagctggcaggtggacggacgcctttctccccactccctcagttggccatgaacactacagaatttagcgtctgctgagggagggaatgaacccccccttggttctgcagtccacattcattgtgagatgcattctggcctgcaaagtcaaccgtccatgtgttgaggaggaaaacggtatgcctcccacatgcaggagtaactccctctccctcctctatagaggatatccttggaaaccctctgtccacataatgggatttatttattcagctttattgagctacaactaataaaaattgtacatgcttaaggtgtacagggtatgttctcatatgcatatacattgtgaaatgcacactacaaacaagctaatacatacatcacctcttacagttacctttgttttttgtggtgaggacatgtaaggtttattctcttagcaaattttaaggaaatatggtattattaaccatagtcaccatgctttccattagagccacagaacttgtttaccttacagctgaaatgttgcaccctttggcctgcacctccgccccccaaccctgaacgcccctggtaaacacggttctaccctctgcttctgcgttcaacatccttagattccacatgcaggagaccgtgtggtatttgtctttctgcgcctggcttattcgactcggcacagtgtcctccaggctcatccatgttgccacagatggcaggatttccttctttatggctgaaggatgttccattcggtgtatctactgcatcttctttattctcgcatctactggtggacacttgggttgtatccatatcttggctgttgtcagtaatgctttgatgagcaggtttaagagcctgttactctgtccattggtgcagtgtcactgggaagcatctgtggcatttcaggtaaatactgagaatgtggatgcaatgagagcccgtggtatggatgtcccaggagtggctctgactttgctgttcacagtatctggaatacagtctaacaccaagaaaaagccaaaacgatcactctgtagcaaagcccccgaaatacggctctttttctgtgtataaaattatttttgtcagttaaaaatactatatgtccaaaaaggatcgaaatggtaaaatttccaattaaagtattatttgctgtgtccccatatacacactttaacacaggtatatttgctctaatttttggtttctttcctttgagtttatgaagtatttccccctaagaaggacattcctggggtatctcaggctgcggaagccctcacagcagcctccctgcatctgcacctgcaccgctggccggggcgggagctcccaggtccccccttcggcgtgggctctgccacccttttacttctttgtccttgctttgcacagcagattcctttcagagccattcagcctgaacatgctcatgtttcctcttagaactcaaagaatgtctgtcacttctgtttttcctgtagtgtatttttgaggtaaaagcaccctttggccactgtccgtctaccccaggctgcctctgtgcgccccctcagagcagcaccagtcactcatgtctacctgaagttggcaacagtcgcattcatcagattagaccacagcaaaacataggtgcatggcttaatgcgcaagagatttggagattttttaccatttcactagccagttaaaggcctattgtgcttttagctttttatcacaacctacccttaaatatcccagacatctgtggtcagaggacgtgaaaaaatggatcattcatgaattaatattggttgaagattgtcctaaacacggctgacttcagcagagacgtacagtgaagcgtgagccggtcctggggttggtgggtagagagcggttctaaaacaggactgagtgctccgccccacttccctttcaccacctgggagaaggtggacccctcgtttcttcatggagctccgttcctcacaagcagaatgcagacgggatgacagttctgtggggattcttcctggatttcagacaatgcctggaatggggcctattctttatcactgtcttcgttttcatacgtgcaataccacggagtaaagatttgaaatagtgtcattactgtcatatttagccaaagttgctttggaaatataatttaacacgtatttgggtttaaatgaagaatttcttttgaattcactttctgatagtgcattttaacctaaacttggtttgttttctaaaatgttttaaagcgcagaactgttacactccgcagacagccagttggcggcttgggcctgagtataaaggtatggaaatggttttctctattcctgctttttatttttgaagaactttccagtgtgaatcatgataaccacgtttctttctgatggctttgtctttcagggaggttctgagcacaacgtccctgtcgtcatatcaaaaatattcgaagaccaagcaggtaaaaacagccaaaatgacctgtgtatgcatcacagccatttgtgagataacaaattactgaaaatgataaaaatcagcagatatgtgttttgctcgattacctaaacttccgttttatttttgtagctgtgtcttgtttcaaaggatgcttcttatgccctgatctgaggctgccctttttaacctctgctgatccctctggcccttaagagagacactaattctctgtttgaggtatcaggttatcccccctctaaagatattgatgattcaggggtttgaatgctgattttaaggtattttaaaaatcgaggagaattacatatagatggagaagtccatggtgttcgttgaagtatctgatacacaagtctctgagcctaagaacgtaatgagcctgttgcaggactagctgaccgcgctcaggtggggctgaaacgccgtccgttctgcacttggcagctggtggtactgcactgactaccacctccatccctgaaatgaaacactggctatgggaataatcacaagaataactgacattcatagggagagattactctgtgtagaatcgaaaagtgagggtgggatttctggccacacattccactatcgggtagactgtttctcatacaattcgattttggacataatgaaccccctgcggtaaactccatgcatctgtctccctatcgggaggattctgcatccttgtggctggcctcctcccacctggtccagcagctcctgggtgtgcagcctcaggccactcctcccctgctctccagagcaaggggcacctggacatgcggtccgtgtcggggggtggggcggttagcttatgtccttgaggcctgcaggggaacaggaagcaagacagagtgggcaagcgggtggccttatgacctcatgtgcctcacaccggaaagcacagccactgcaggggacccctggctgtgtccctggaggggacatgcttctctccacgctccaccagaaatgtggaggttctgggtgaaaagcacagaataagctcatactttttctctaaacattcttactcatttcacccaattttacccaaaccataagcccagtatgcaggtagagtgccctgaagaggctggaggtcccaggctggggaagccttaaccatgagccctctgaaggtgggtgcagtgagggcagtgatggtcaggtcctctgaaggtgggtgcagtgagggcagcgatggtcaggtcatctgaaggtgggtgtggtgagggcagttgtggtgagggcagtcatggtcaggtcagccatgtgtggtgcaggagaccatgttttgctgcagagattgccccagtgggatttggattccccacagcagctgtgaacacgttctcagggaagagaggtttccacagaatgcgttgccatgaaatttgcatccgggtaaagattctttttcggcagaaggacatttaagagtcaggtcagcaacacatttttctcctttttgagcaagcttacaaacctgccgttaaacttgcagcagatgggattccatttaatcaggaattaggggccagcaagccccgaaacccagaggcagtctcagcctcagaggcagcaggtgctgttcagaaggaaacctagaaatttaagtgtgataagaaatacaggttagttgtaaccaagatggcgggaaaagtgagagagctatgcaggcctctgaatgaaaggacgattcttttccagggtttttttttttggtttcttcccccaccccactgacagagtctcactgagatgcccaggctggagtgcagaggcgcgatctcggctcactgcaacctccacctcccaggttcaagcgattcttctgcctcagcctcccgagtggctgggactacaggtgcccgccaccacgcctggctaatttttgtatttttagtagaggcgggggtctcgaactcctgacctcaggtgatctgcctgcctccgcctcccaaagtgctgggattacaggcgtgagccaccgcacccagcctctttttgaggtttttcgagcatttcaaaagaaacattatgattcatttgaactacagtattttgttgcatgtattacatcaagtgttataatggcggtgttgacgagcttggcagggcccagtgctttggctcatataaagtgggattccacacgggcgccgtgggtccaccgttgctgtgtcgggcgtggttggttcttgttgcacccctgaagccatctggctgactgatggatagtggaaagaaggcatggcccaatgcagctctgttcctgtcctctttgcaaacattttcagttattttcattaatgggtttttttttaattggtggatatgatgaaaagtctcagaaaagagaataagacagtaaggttagccagtaggtaacgttcagtaaaggatgtttatggtcaattcagaaggaaaatccattttacctgtaggggagaaacagctcaagaaggctacactccctggagtgtgaacgtgaccctggggttgtagcccgtgtgccctcccgagcctcatccctgcctcaggcaaccaaggcttggtgagtgtggtcaggagaaactgggacccaggagattccaaacttagcagtcttcagaccatgctgatgccattctcttctgacattggaagcttcacaagtaactccagtgtggtagccccagtgggaggtccccacgctcctcccaggcctgctcccaggctcgcattctgtgcctcctgcagatttcccacccagagcctgcctgcctgcccctgctgccccctcccccagccagcttgcctgtctccatcctcaccacccctccaggcccaggcccaggcccacgacctcagcaggcacttggagatgaacttacatggttcctccctgcacctgcctctccccactgggatccatttcatcagctgtgccagaattcatgttttagagacacatttatatcctcgttttatgcacattcaggaacagaaagtcctggcaatgaattgggagtttttagggatcagaagcttggtctcatttattttatgtcttccattccatgtaaaacacagaatgcatgttttgcaggaagcagagcccctgggttgtcctgaatgtcttgtgttaaactgacacaggagtctggcctcaggatgaagggagtgcaggagggctgtgggacttcggtgctggagcccaggagagcataccctctaccccacggagcacagcgctgccagatagggcgggatgcagacaaaccaaatgcggggtgatcagttagaactaggaatacctacggatgctaagagaagctgtctgcattcctccacattttagatcctcttctggatgagcaggtctgcagttatccccaggtgatgagaggccgggacaggtgggaaagctctccagctctcattctccagggacaccagagcagccaggtagcccgaggcttcacctcgctcatttttaagaatgaggcagttgtaagatgttagatcagtgcaaaatataaaattattagtgtgcttatttatccatgagtttatccaatcatatttaataaacaacttctacagataagacgcttctcgggccatccgcagagaccaaggcagaattcttgccattgcagagcttgtagacaactggagaaggcaggcagtgaacacgtgtgcgatacatttgcagagatgacggctcctgtggagtgagcgaaaccgtggtacagaggagacggggagagggcgctgttttttgtaatgtggttaatgcttttatcctgtgagtaagagagtcagctgaagttggtttaaaattagtgtgattagggtagcttctcatttaagaaaagtcaccctggctgttgtgaggaggctgttccaggaagcagggaggaaggtggagagccagtgcagggtgcaggaggggctgccgtgccctgcccttctgggattttggtgaatttgtagataagtggccagaagccggatgtccttggaggctccacgtcacatgctgctgaagggtgggctgcgtgtctgagaggaaggaggactcaggccaggttgaggtttccttttagcctcagcaccaggggggctgatggtgcgtttaatgaaatggccgacacaggtcctgggttgttgagtgaatgtcagaagcagagcgtggacagcaggggctccgtgctgcgtttcagggctgatttgctggccagtggagtgtacctgtgagaggttcagaggacgatatcagggtaagagaatttttaaagagaggcatttaaattaagtgaatggcactgaggtgcttccccagagacttgctgtaggtggagaggagaaggtgcctgaggcctgagttaggagtgtggacagcccaaggctggacacttgcctgatgtccgagtggagccaggcagcccagctcagctcactcgcaccttgaattcttcgcgaagtggctcgtgagcctctgaattgcctgagcagctttgcagagcatgacagagccaagactctgattgtaccgttgaggtgcggcctgcgtgcaggattccacaccctggagcccccgccccctggtccctctgatgtggagaccttcagacctcacactcctcacaggggactcaggattcacaggtccacgtcatgggtgtggagaggctgggaggtcgagataggtctgagactctcctcagtgcagatatagggttgagcacatatgtctagacattgtttaatacctagtgagattgtatattttggggagatctataattatttttattgtgtttaatgggaaatttgttaatattacatttgaaaggttaaatataatttttcttgacattaaatatcaatcacaaattttaattctttcaattcattaacctttcaaataaataatgattataaatttctttttttttttatttttttttttagatggagtcttgctctgtcgcccaggctggagtgcagtggtgagttcttggttcactgcaaccaacctccacctcccaggttcaagtgattctcctgtgcctcagcctcctgagtagctgggattacaggcacccgccaccacgctcggctaatttttgtatttttagtggagacggggtttcaccatgttggccgggatcatctcgatcccttgacctcatgatcctccccctttggcctcccaaagtactgggattacgggcgtgagccaccgcgcctggccatgattataaatttctaccaatgatccatttgatgattttaaacttcatagacaccagacaaagcctccgtgcatgctgtgattgcaggcgcacactcattgaatcggttgttaggttaacaaacgttatagacccctgagtgctaagcactgtcctctgtgctgagagtagagaagcaaaaaatagactgatttcttgctttcagagcatgtacattatagtcggagaagataataagcaaagatacaaatgaaattattatgtcaggtatggataagactagggagaaaaatatagctacatttttgctaatactttcaggcattctatgacctttaactaccctatgagatgatgactaggattttcattcccattttacagatgaggacactgaggcaaatatatgttaaagagtttgcacagggacagacatgcaaatggcagagccggggagtgacccccaagacccttctctgggtcatcgtccggtgctgcccctctttcaaacgtttgtaaagaaccagtgcaatgtggttacgacgttttttcatttattctttacttttacacatttcttcggttattgctctatgttggtgttgcctagggttaataacttcctagtgtagtaatagtgaaattattaaacctgaaaaggaaaaagcagtgtcttttcagacgagctgagtgacagggtctgttctttgatgcatgggttattgattagtgatacgagatttgattaattctctcaagataatttaaaaataaacactttgtatcaagctttctttttatagttgaacttcttttgttaagtcaatagacttctaatgtgcacatgtttacctaagttttaggtttctgcatgtatgtacctcagggaaaacacaaatggagaaaggaaaaactcacttgtcagcgtggcccaagccctgccgtgggtccttttgtcagcgtgtgtggccctggggtgctggcattgtgaaaacctggggactccgtccaggaggggccgtgtgtgctgtgaaatcctctcagcttacggtggtttgagtgaatagggcttgctcttctcactgaacgagaaatccggctgtttgctgtggttttctcccagtatctttccgtcctcccgtggcaccatccttagcttgtgggttttatcctcatgttcattgccttatatttgcaaaatggtggctgtatttcaagataacatatcttctttttaggtaggaaagaagggaaatggggcaccacccctgaagaagcaccgtggttccatctccgggaaggaaagccttcatggtattccttcatttccatccacccactggaaccggacccaagttcaccctcagaaaggctgagggagcaagttcttcatgagttgttggacagccttttgccactcccttaggggaatgcaggggttccattcgctgagagcaacacactctgccctctgctgaaccatgggagcaggccaggctctgccacaaggctgagagggtttggtgggggtggggtgagtgtggggtggccccacttgcattttgtcattgccagctgtgccatgcagagggtcttggctggggtttgtttctgtccatggtttcaggcatctgctgcagggcttacaacttagataagggtggttgccatatgatgttctgcatgaggtccaccttaggtgcttagacatttaaattcttagatatggtgtccttcacactttaattcaccgctttagtgaggtgtgtgcacccgccaaggctcacacgtcaggaaccacacacgtacgtgctccttaaggcagccttcagcctacttagcaaccgctctccaaaaaatctgttttaatacctaaaatcaccatgggcgattggatttgacaccgttctatacatagattttatgaggattggatttctctgagcatggttcagtactgaggataccaagctcctgctcactctccctcctatgagattcttcctcaggaccctgctgcccctggcccagaaatcatccacgacttcattgcttacggaaaagccgaggtgcaggctgggctttccagctcacctcacatcctgggtcccacagccacatttgtctcctccctgctccgatgcatggcacaggatggcaccccaagtctccaccctcacctggaagatcagcctcccccgcgtgtcacagccaggtcaggatgcacacctggtggcccctgaccccgaggcctctcaccttgctccttggtaatagtgggcgcacactgtcattggggtgcagggtatggagagctccttggtaataatggacacgtgctgtcactcgggtgcagggtatggagagctccttggtaatagtggacacctgctgtcactcgggtgcagggtatggagagctccttggtaatagtggacacctgctgtcactcgggtgcagggtatggagagctccttggtaatagtggacacatgctgtcactcgggttcagggtatggagagctccttggtaatagtggatgcgtgctgtcactcgggtgcagggtatggagagctccttggtaatagtggatgtgtgctgtcactcgggtgcagggtatggagagctccttgataataatggacacgtgctgtcactcggtgcagggtatggagagctccttggtaatagtggatgcgtgctgtcactcgggtgcagggtgtggagagctccttgataataatggacacgtgctgtcactcgggtgcagggtatggagagctccttggtaagagtggacacgtgctgtcactcgggtgcagggtatggagagctccttggtaagagtggacacgtgctgtcactcgggtgcagggtgtggagagctccttggtaacagtggacacgtgctgtcacttgggtgcagggtatggagagctccttggtaatagtggacacacgctgtcactcgggtgcagggtatggagagctccttggtaatagtggatgcgtgctgtcactcgggtgcagggtgtggagagctccttgataataatggacacgtgctgtcactcgggtgcagggtatggagagctccttggtaagagtggacacgtgctgtcactcgggtgcagggtatggagagctccttggtaagagtggtcacgtgctgtcactcgggtgcagggtatggagagctgcttggtaatagtggacacgtgctgtcactcgggtgcagggtatggagagctgcttggtaatagtggacacgtgctgtcactcgggtgcagggtatggagagctccttggtaagagtggacacgtgctgtcactcgggtgcagggtatggagagctgcttggtaatagtggacacgtgctgtcactcgggtgcagggtatggagagctccttggtaagagtggacacgtgctgtcactcgggtgcagggtatggagagctccttgataataatggacacgtgctgtcactcgggtgcagggtatggagagctccttggtaagagtggacacgtgctgtcactcgggtgcagggtatggagagctccttggtaatagtggacacgtgctgtcactcgggtgcagggtatggagagctccttggtaagagtggacacgtgctgtcactcgggtgcagggtatggagagctgcttggtaatagtggacacgtgctgtcactcgggtgcagggtatggagagctccttggtaatagtggacacgtgctgtcactcgggtgcagggtatggagagctccttggtaagagtggtcacgtgctgtcactcgggtgcagggtatggagagctgcttggtaatagtggacacgtgctgtcactcgggtgcagggtatggagagctgcttggtaatagtggacacgtgctgtcactcgggtgcagggtatggagagctccttggtaagagtggacacgtgctgtcactcgggtgcagggtatggagagctgcttggtaatagtggacacgtgctgtcactcgggtgcagggtatggagagctccttggtaagagtggacacgtgctgtcactcgggtgcagggtatggagagctccttggtaatagtggacacgtgctgtcactcgggtgcagggtatggagagctccttggtaagagtggacacgtgctgtcactcgggtgcagggtatggagagctgcttggtaatagtggacacgtgctgtcactcgggtgcagggtatggagagctccttggtaagagtggacacgtgctgtcactcgggtgcagggtatggagagctccttggtaatagtggacacgtgctgtcactcgggtgcagggtatggagagctccttggtaagagtggacacgtgctgtcactcgggtgcagggtatggagagctccttggtaatagtggacacgtgctgtcactcgggtgcagggtatggagagctccttggtaagagtggacacgtgctgtcactcgggtgcagggtatggagagctgcttggtaatagtggacacgtgctgtcactcgggtgcagggtatggagagctccttggtaagagtggacacgtgctgtcactcgggtgcagggtatggagagctccttggtaatagtggacacgtgctgtcactcgggtgcagggtatggagagctccttggtaagagtggacacgtgctgtcactcgggtgcagggtatggagagctgcttggtaatagtggacacgtgctgtcactcgggtgcagggtatggagagctccttggtaagagtggacacgtgctgtcactcgggtgcagggtatggagagctgcttggtaatagtggacacgtgctgtcactcgggtgcagggtatggagagctccttggtaagagtggacacgtgctgtcactcgggtgcagggtatggagagctgcttggtaatagtggacacgtgctgtcactcgggtgcagggtatggagagctccttggtaagagtggacacgtgctgtcactcgggtgcagggtatggagagctccttggtaatagtggacacgtgctgtcactcgggtgcagggtatggagagctccttggtaagagtggacacgtgctgtcactcgggtgcagggtatggagagctgcttggtaatagtggacacgtgctgtcactcgggtgcagggtatggagagctccttggtaagagtggacacgtgctgtcactcgggtgcagggtatggagagctccttggtaagagtggacacgtgctgtcactcgggtgcagggtatggagagctccttggtaagagtggacacatgctgtcactcgggtgcagggtatggagagctgcttggtaatagtggacacgtgctgtcactcgggtgcagggtatggagagctccttggtaatagtggacgcacgctgtcactggggcgcagggtatggagagctggatgcacagcttcatcatgacatgtcatactttcggaaagcaaaagcggcttgcgaagtcccctaagccccttttattccccctaacagtggtttgctctcggtgatcacccagttcatacttaatgaaatgaggaagaatgaagctctcctctatgactggatggaatttacatgtggtgtttccaacacagcaaaactttcgaaaccgaagccaggctccatataacacacagagaaaggatgatgaaaaccacatgctgaaaaaggatgtggaagtcagagggtgccatctgcataggaattcctgacattgatacttgtcatacgaaaataacttcctttttcattggatcttcataaaaaacatatgaaatgggcaagggacgcatgattattcacatttcatagggcagcagataaacaggaattatgagttgcccagttttactccgctaacaagggcttataaagagtcctttacttgtacacttagatttttccctcgaaatccagttcttcctactatagcatatcatctcattaggtacaaagaaaattcattcacagccacagtttaattccacttaaataaattaatggtaataaataatttaataaataataatgcttcgtaagaatttatctgtaagataggcctgggccctgtagctaatttgatgtgtatattcgggagacaaatgggacaattagaaaatactcagaaaattgcacagaaaggaaggggtgttttgtccccgaaagaaaggcaagacgaacgcgaaccttcagtcgttctcatgtggagtattcatcgttcagcgccaggaagtatcctgagctgaagggcgggttcttacagaggccatctgagctacagtgggaatgtcaggttggacacgaggctcactgttactcatgaagatgttgacacagaacgacgatttctataaccaaatatatatactacatttggtggggaaggaaagggaacacaaaacccaggtcccaaagctccctgttcaggtctctgtggcacagcggctgtggcggagttttgtctggatcctgtcgtcgtctaaagtcatggcctggacacctgtaaacacaggaagaatcacccttttcataccaaagtcacagagacttatgagctttgtgtgatggggtcaccatgacatgggcctccacctgtattttattgttctctagaattttcacctgttattggtgtcttagtgccatgcacatgccttcattatgccagatctgtgattaatttctttctgtgttaaatttatttcacctgttctgctgaatttgctgtgaagcctttctcccctaataccttctcctctgcctccctccctcccatgtaaatattgatttagatgtctttatattaatgtaaggtcctgcccttcacatggcatagagaaacccgtgatgaatgcccccattgtccctcagaaagcagagacttgagcagctgagatgcctcttcccagagctggaatccttcacagcactgcctctctggcatccgctcctcacaccgctgggcctttgcctttgccattcatcatgtctgctgtgctgccatatcttcctttctaggctctaaaaaatggcttttgaaattcaaaatgtgatacaactactcaggccaatgtgcctgcactaatatataagtcagatactatctggtttttcttctggagctctataaatatttgatagagtccttctattttagacggttgaacctggatctggctacatgtgtgcagaaacacaatgtcagaaatcttttctcacctggcggtgggtggatgtggaattcaatttgtaacttttaggtctaactttcctaactgtgctttctgtcacaagccaaaatctgctttttgtctcaagttagctttccgtaagaatgaagggagtcccattttccaatccccagatctagacagaggtacagcagattgaatgaagaatattctggtgttactgctttattgctaatgaatcaatgaaaggcatggttttaaagctatcaaagtataaatagaacttgacaaggataatataaaatggacttagtagctgaatgagaaatgccgaaacctcaaaaagaatcacaagaaacatcagaagccctgaagtgtgcgtgctgtgcactgcaggtcaaatttaaattctgagtaacaagaggcttcctcctcaggagaagctggaagcaggaaggggagtcagcgtacggccgggcccctcttacctttgcagggtccctgctgttgagattaggaccgcaggtgtgcagcagagaatccagttgttttgctttagaaagtgcctgaagaacaaatccttcgggccccaaagatgctgtcctgggatctactttgccattgctcctcaagttcagccagtgttatggcaggtgtcagcatccaccaaaggggaccttcctgtaagatgaaaaatactttttaatttaaatatacataacacttcaaaatgtccagtgtccttcaaattacttcaagaatttagatttccctgttatcaatgataaataatctcccaaggccacttagagagactccctgagaagaatcgtgtgttctaagtgaggtttaacccttacagtcctttgagaaagatcgtgtgtactaagtgaggtttaacccttacagtcctttgagaagaatcgtgtgtactaagtgaggtttaacccttatactcctttgaggaggatcgtgtgtactaagtgaggtttaacccttagagtcctttgaggaggatcgtgtgtactaagtgaggtttaacccttacagtcctttgaggaggatcgtgggtactaagtgaggtttaacccttacagtcctttgagaaggatcgtgtgtactaagtgaggttttacccttacagtcctttgaggaggatcgtgtgtactaagtgaggttaaacccttacagtactttgaggataatcatgtatactaagtgaggtttaagccttacactgctttgagaaggatcgtgtgtactaagggaggtttaacccttacagtcctttgaggaggatcgtgtgtactaagtgaggtttaacccttgcagtcgtttgagaaggatcgtgagtactaagtgaggtttaacccttacagtcctttgaggaggatcctgtgtactaagtgaggtttaacccttatactcctttgagaagaatcgtgtgtactaactgaggtttaatcctcacagtacttggaggaggatcatgtatactaagtgaggtttaacacttacagttcattgaggaggattttgtgtactaagtgaggtttaaacctcacagtcctttgtgaaggatcgtgtgtactaagtgaggtgtaacccttacagtcctttcagaaagatcgtgtgtactaagtgaggtgtaacccttacagtcctttgagaaagatcgtgtgtactaagtgaggttttacccttacagtcctttgaggagaatcatgtgtactaagtgagggttaacccttacagtcctttgaggagaatcatgtgtactaagtgagggttaacccttacagtcctttgaggaggatcgtgtgtactaagtgaggtttaacccttacagtcctttgaggaggatcgtgtgtactaagtgaggtttaacccttgcagtcgtttgagaaggatagtgagtactaagtgaggtttaacccttatactcctttgagaagaatcgtgtgtactaactgaggtttaaccctcacagtacttggaggaggatcatgtatactaagtgaggtttaatacttacatttcattgaggaggattttgtgtactaagtgaggttaaaccttgcagtcctttgtgaaggatcatgtgtactaagtgaggtgtaacccttacagtcctttgagaaagatggtgtgtactaagtgaggtttaacccttacagtcctttgagaaggatcgtgtgtactaagtgaggtttaacccttacagtcctttgaggaggatcgtgggtactaagtgaggtttaacccttacagtcctttgagaaggatcgtgtgtactgaggattaacctttacagtcctttcagaaggatggtgtgtactaagtgaggtttaacccttacagtcctttgagaaggatcgtgtgtactaagtgaggtttaacccttacagtcctttgagaaggatcgtgtgtattaagtgaggtttaacccttacagtgttttgaaaaggatcgtgtgtactaaggtttaaccactatagtccttttatgagaaccatgtgtactaagtgaggtttaacccatacagtcctttgagaagggtcgtgtgtactaactgaggtttaacccttacagtcctttgacgaggattgtgtgtactgaggtttaacccttacagtcctttgaggaggatcgtgtgtactaagtgaggtttaacccttacagtactttgaggaggatcgtgtgtactaagtgaggtttaacccttacagtcctttgaggaggatcatgtgtactaagtgaggtttaacccttacagtcctttgaggaggatcatgggtactgaggattaacccttatagtcctttgagaagaatggtgtgtactaagtgaaatttaacacttacagtcctgtgaggagaatcgtgtgtactaagtgaggtttaacccttacagtcctttgagaaggatcgtgtgtactaagtgaggattaacccttacagtcctttcagagggatggtgtgtactaagtgaggtttaacccttacagtcctttgaggaggatcgtgtttcctaagtgaagtttaacccttacagtcctttgaggagggtggtgtgtactaagtgaggtttaactcttacagtcctttgaggaggatcgtgtgtactaagtgaggtttaacccttacagtcctttgaggagaatcatgtgtactaagtgagggttaacccttacagtcctttgaggaggatcgtgtgtactaagtgaggtttaacccttacggtcctttgaggaggatcgtgtgtaactaagtgaggtttaacccttacggtcctttgaggaggatcttgtgtactaagtgaggtttaacccttacagtcctttgaggaggatcgtgtgtactaagtgaggtttaaaccttacagtcctttgagaaggatcgtgtgtactaactgaggttcaacacttacagtcctttgaggaggatcctgtgtgctaagtgaggtttaaaccttacactcctttgaggagaatcatgtgtactaagtgaggtttaacccttacagtcctttaaggaggatcttttgaactaagtgaggtttaacccttacagtcctttgaggagaatcatgtgtactaagtgaggtttcacccttacagtcctttgagaaggatcttctctactaagtgaggtttaacccttagagtcctttgaggaggatcgtgtgtagtaagtgaggtttaacccttacagtcctttgagaaggatcttctgtactaagtgaggtttaacccttacagtcctttgagaaggatcgtgtgtactcatgtttaacccctatagtcctttgaggagaattgtgtgtactaagtgaagtttaacccttatactcctttgagaaggatcgtgtgtactaagggaagtttaacccttatagtcctttgaggaggattgtgtgtactaagtaaggtttaacccttatagtcctttgagaaaaatggtgtgtactaagtgtggtttaacccttacagtcctttgaggagggtcttgtgtactacgtgaggtttaacccttacagtcctttgagaaggatcgtgtgtattaagtgaggtttaatccttacagtcctttgaggaggatcgtgtgtactaagtgaggtttaacgcttacagtcctttgagaaggatcgtgtgtactaagtggggtttaacccttacagtcctttgaggaggatcttgtgtactaaatcaggtttaacccttacagtcgtttgaggaggatcgtgtgtgccaagtgaggtttaacccttacagtcctttgagaaggatcgtgtgtactaatgtttaacccctatagttctttgaggagaatttcgtgtactgaggtttaacccttacagtcctttgaggaggatcgtgtgtactaagtgagttttaacccttacagtccttggaggaggatcatgtgtagtaagtgaggtttaacccttacagtcctttgagaaggattgtgtgtactaaggtttaacccctatagtccttttaggagaattgtgtttactaagtgaggttttacccttacagtcctttgaggaggatcgtgtgtactaagtgaggtttaacccttacagtcctttgaggaggatcatgtgtactaagtgaggtttaatccttacagtcctttgagaagaatcttgtgtactaagtgaggtttgtcccttactgtcctttgagaagaatcgtatgtactaagtgaggtttaacccttacagtcctttgaggaggatcgtgtgtactaagtgaggtttaacatttacagtcctttgagaaggatcgtgtgtactaagtgatgtttaagcctcagagtcctttgagaaggatcgtgtgtactaagtgatgtttaacccttacagtcctttgaggaggataagaagagtctcccttgtgcagggacagtcactgaagtttggggaagtctaggaattttaaaagaacaggattttggaaatgaattcaggtcaatgttcaagccccattctgcccttttgagtggccccgagatggcccagggcctgccctccaggaccttggcggaggtgggggccaacgggttcctcttctaacagactgtggtggaaacagtatcagtttccttatgaccaacacactagtgagggaatatcatgataaatttatgactgaaacaccttacgtttgtgcagttcacgtacacaatggggatgtaatcgtaggtggttggatgtggcgtcttcagagcttagggtgcttgtgagttaagggagcttggtggtcacgggttttagggctttctttctgagaagcagagctatcgattgctacctaattgaaaagattgtgtgagtctgtaatgtttttctcttattcactagaacactttatcagcctgacaacattggaaaggaaacagaagctgccagggaagcaggtgtgaaaacagctccagttactcaggcaaggctgtggctgctcacccgtggccctggctcacgcaaaactctccagaattaggggtgctcttgcatgggggtgctctggtgtgtgggtgctctggtgtgtgggtgcttcggtgtatgggtgccctggtgtgtgtgtggtctggtgtgtgggtgctccagtgtatgagtgccctggtgtgtgggtgctctggtatgtgggtgccctggtgtacgggtgccccggtgttcgggtgccctggtgtgtgggtgctctggtgtgtgggtgctccagtgtatgagtgccctggtgtgtgggtgctctggcatgggggtgctctggtgtgtgggtgctctggtgtatgggtgccctggtgtgtgcgtgccctggtgtatgggtgccgtggtgtgtcagtgccctggtgtgtgggtgctctggtgtgtgggtgccctggtttacgggtttcctggtctgtgggtgccctggtgtatgggtgccctggtgtgtgggtgctctggtgtacgggtgccctggtgtacgggtgccctagtgtgtgggtgctctggtgtgtgggtgccctggcgtgtgggtgccctggcgtgtgggtgcctggcgtgtgggtgctctggcatgtgggtgctctggtgtacgagtgccctggtgtgtgggtgctctggtgtgtgagtgccctggtgtgtgggtgctctggtgtgtgggtgccccaatatgtgggtgccccggtgtacaggtgccccggtgtacgggtgctcttgtgtgtaggtgctctggtgcgtgggtgctttgctgtatggatgctgtgatgtgcaggtttattttccaaaagttaggtaagaacatcactcaagatgattgagtctttttctaattccaaaggcactttaaggtttcagagagccttggattgtttaatagagaagacatggcagaacataaaccatagaaggtgtctgagatgactgtaattttaaacaagttcctaatattaatacactgcaaaatatcatttaattttaatagaaacaacttttactattatctttcctttttttctttctcgttgaaatgaagacttaacatcaaattcagcaaaacagatgaaatcaattaaaatataacatggcgtgcagggcaggcacggcctcctgcccctggggagctggagccctcacggagtcctgtgtgtggctgtgctttctggggctgagcagatgaggtagctcagttccccaggaatcagaaccgaggcggagctgtgccaccccagcctccagggtgaacagcaacagctccctgaaactggacgagctccccagagttcaagctacagaggttcctgcctccccagggcatggagtcctcactgcactgctccccaccttgtgggccccaggctgcgctggcatcttgccattcccgggtctttgctgctgctgcactggcctcacagggcctgggccactgccatgtcctgccatccctgagtcactagtgtgtggcacctcatctcctgggctctagttgctgctgtgccctgttggttttgggtccaggattgcagctgtgccctgtatcccaagagctgagcttctgaagaaccccttatctcccagggccatgacagtgctatgtccagccccccagggtcagaaccagagctaaaacctggccccccaggtctgaactgccagagtctgcctcagaacaacagaccccagctttgtggacaatctgaagccacctgagccccagagagtgaatctgcaccttgagcaccggatgccacaagggcttcacgtcaccccagggccctggttccacagctgccctgtgcacctgtgccctggatctcagtgccactgcagctgcttgtgggccgtgtcagaccctgcgctgagaaagatcccctcagctgagactcccctctacagagaagtcaaaagtagtaggatacatgaagcccttgccaccaaggaccctagacttatgctgccaccatcattgtcctgaattcctgcagcctatgccacttagacacccacagtcattcctgacattcattacaactgaagaacctgcacagagactatacccctgcaccctgtccaaccagcaccctcaggcccatctgtatgtgaaaatcttcccctacaaaaggcactacttaaaaattagaagagataagaatcagatagcataaaaaggaaccagacagaaatctcaaagctgaataactcaatgaaatcataaaaaaattcagtagaggacttcaatagcagacctagattaagcagcagaaaaaaaaaatctgtgaacttgaagagaggtcttttggaatgactcatttggggaggtgaatagaaaacggaataaaaatagtgaagaaagcctgtggcactcacaggaagcaatcagatgaagaaagttctgtattatgggactgagaaggagcaaaaacagaaaaaaaggacagaaaggttatttaataaaataattactgaaaacttggaagttttcagtcttgggagagatatgggcattcaatttcatgaagctcaaagatcaccaaacatattcaacccaaagaggtcttcatcaaggatcgttttaatcaaagtgtcaaaagtcaaaggcaaaaaaaggataattttaaatgaagcaaaagtgtcaagttgcatataaaggaatctccattagtctatcagtggatttctcagcagaaaacttgaaagccaggaaagaatagtatgatacctacagggaaaacaaacaaacacaaaaaccattagctaagaattctgtgctcagcaaagctgcccttcagaaatggagaaagtaagtctttcctagataaaaaaaagaaaaaagctgatggatttcataatcactatgcttgctgtatctgaaatgcttaaaggagtacttcaagcagctagaaaagtgtaatcactatcacaaatacacttgaaggtaccaaactcacgggtagaaggaagtacgtagtcaaattcagcatagtccagtgtcatcatggtggtgtgtaacccatacatgtctccagtatgaaggtaaaaagtcaaaacagtaaaactaaggccataataactttttaaggtatacacaatgtcaaaagatgcaaatcgtgacatcaagaacataaactgtggaggagaagttaaaggctcgttttttttttttttgtataaaaaaatgtaagttgtctgcagcttaaaatagtagactataagatattttacataagcttcataatatccacaaaacaacaacagcaacaaaatgatagcagacatacaaagggtgaaaataaaggaatcaaagctgagcaccacagaaaattatcacgttacaaaggcagacgagagtggaggaaagggacagaggatctgcaaacaacaaaaaaaataagagaatggcattgctcatttcttatctgtcaataatcaccttgaatattacaaataagaaaataagagaatgactggtcattccttttctatcaataatcactttgaatattacaaataagaaaataagaaaatgtcattggtcattctttatctatcaatgatcaccttgaatattacaaacaacaagaaaatgagaaaatggcattgataattccttctctatcaataaacaccttgactattacaacaagaaaataagaaaatggcattgatcgttccttatctaccaataatcaccttgaatattacaacaagaaaatgagaaaatggtattgatcattctttctctatcagtaattaccttggatattccaaacaagaaaataagaaaatggcatttgtcattctttatcaataatcgccttgaatattacaaaacaacaagagaagaaaatggtattggttattacttatctatcaataattactttgaatattacaaacaagaaaataagagaattgcattggtcattccttatctatcaatcaccttgaatattaccaacaacaagaaaatgagagaattacattggtcattccttatctatcaataatcacctggaatataaattgattacattctcccatcaaaagacatatagtggtgaagtagactgaaaaagagatgatcccaactatatactggctataagagacccgctttatctttaaggacacacacatattaaaagtgaagatagggaaacaatattccatgcaaatggtagccaaaagagagaaggggtagttaaacttaacatctgataaaacagactttaaatcaaactggtcacaagagacaaagaaggcctttatctagtgaaaaggggataatttatcaggaggacataacaatcataaacatatatgcatccgacattggagtacttaaatacataaagcaaatattaatgaacataaagagataaatacatagcaatacaacagtaataggggacttcagcaccccactttcaacaatagatagttcaactagacagaaaatcaataagaaaatacaggacttgaattgcactttgggccaaaaagacttatcagatatataaagaactttccatgcaatagcagcaaaatacacatttttctatagcacacatggaacacacacatggatagaccatatattaggccataaaacaagtcttaacaaattttgtattgcaattctatctagtatcatctctgaccacatggaaggaaactaaaaatcagtaacaggaggaatcttggaaaattcataaataggtagaaattaaacagtattgccctgaacaatcaatgggtcacagaaggaatcaaaagtgaaatttgaaaactatctatcttgagacaaacaacaacagaaatacaacctaccagaacttctgggatgccgcaaaaacagttgtgagaaggaaattgatagtgataaatacctacattaaaacaaagatcctaaatagcctaacattaagcctcaagaaatgagataaagaacaacaaagtaaaccaaaagtttacagaaggaaggaaagaggatgagaacagaaataagtcaaacagacaatagtaaacaataaaaagaattagtaaaactaagaattgtttttaaaaaaaaataaaattggcaaactcttcatctgtattagtccgttctcacgctgctataaagaactgtctgagactgggtaatttatatgaaggaaagtgtttgactcacagttccgcatggctggggaggcgtcagaagacttacaatcatagtagaaggtaaaggggaagcaaggcaccttcttcataaggtggcaggaaagagaatgaaggcaggaggaactagctaccacttgtagaaccatcagaccttgtgagaacccactcagtatcatgagaacagcatgggggaaactgcccccatgatccaatcacctccacttgttctctcccttgacacgtggggatcagggtgattgcagggattataattgaagatgagatttgggtgggaacacaaagcctaaccatattataatctaagaaacagaagtttcaaataaataaaaaaagtgaaggcattaccatggacacctcagaaatgaaaggatcataagggactattatgaactattatatgccagaaaattggactacctagaggaaatggttaaatttgtggaaaaatacaacctgccaagtttgagtcaggaaaaaatagaaagactgaactgaccaaaaccaaatagggacatagaaaaagtaatcaaatcctttcaacaaaagaaagcatgggaccagatggcttcatggctgaattataccaaatattcaaagaagaaataatatgaatacttctcaaactctttcaacaaataaatctagagggaataattatgtatacatttttaaaagccagcatcaccgtgacacctaagctgaacaaagatgtcactaacaatgaaaactacaggccaatttttctgatgaacaaatgacagaaacattctcataatgactttagcaagccaagtccaacagcacattagaaagattacatgtcatgaccaagtaggattcatccatggcatgtgaggccagtttaacattttcagattaaccaatgtgacacatcacattaacagactgatgcagaaaaatcatttgacaaagcccaatatctatgataaaaaatctcaccagttcaggtatagacagcatgttcacaataaagctatttatgaaaaattcctagctagcattataatcaatatgaacaaacgctttaacattaagatcctctgcaagacaaggatgcccagtcttgccgattttattcaacatgacactggaagtacttgcaattagcaatcagacaaaaaaaaaaaaaaaaaaaaggcatccgaataagaaaggaagaagtaaagttatctatttgcagatggcatgattctatttgtaaaaaccccaaagattccacagaaaaactgttagaaccaataattcagtaaagtttcaggatatgaaattcatatgcaaaaattaatagcattgtcatacacaaataatagctgaaaaagaaatcaaaacaatcccatttattaatgcaagcatcagaaaaaaataaaatatttagcaataagtataaccaaggagataaaagacctatacaatgaaaactgtaaaatattgatgaagacaattcaaaacattgaagaagataccaataaatggaaagatattttgggctcatgtctgggctcatcataattaatattgctaaaatatctatgagccaaagttatatatagattcagtgtaatccttatcaaaatcccaatgacatttttcacagaaacagaaaaaacaattcaaatattcatatggaatcacaaaagaccctgaatggccaaacagttctaagaaaaaaaaagttggaggcatcacactttctgatttagattatattactatagtaatcaaaacagtatggtgttggtataaaaaacagacacctacaccagtggagcagaatagaaagcccagaagtaaaactaaacgtacatgctcaactaattttggactaagggcatcaggaggatacaatggagaatgtatagtcttttcaataaatgttgctgggaaaactggacttccacatgtgaaagagtgaaattggactcttgtcttacaccgtataggaaacctaccaaaaatggatgaaagtcttaactgtaagatcagaagccataaaactcctagaagagaacgttggagaagagctcgttgatattggccttggcaataatttcttggctgtcacaccacaacctcagactacaaaagcacaaatagataaattggactacatcaaactgaagttcctgcacagcaaacaagaccagcagcctatggattgggaaagtatatttgcaaaacatgtatctgataagaggttaatattcaaaatttatgaagaattcattcaggttaatagaacaagtaaaccaattaaaaatgggcaaggcagatacagaaagacaagcgccacatgctctcacttatatgtggaatctaaaacaattgaactcatggaagcagagagtagaatgatggtcacagaagctggggattggagaatggggagatgacggtcagagggcacagactctcagttgtgcaggaagaattttttttaagttctattgcacagtgtggcaaagatagctttttaatagattattgtacatttcagaattgctaagaaaattatcttgttttcattataaaaacatgtgaagtatttgaggtcatagatatgttaaccagcttgctttcattatcccatattgcattcataaatcataacattatttttaccctgtaagtttatatgattataaattgtcaattacaatttgaaaatatatagggtggaatattactcagtctttttttaatttttctcagacagaggcttgctttgttgcccaggctggagtgcagtggtgcgatctcagctcactacaagctctgcttcccaggttcatgccattctcctgcctcagcctcctgagtagctgggactacaggtgctcgccaccacgcccggctaattttttttgtatttttagtagagacggggtttcattgtgttaaccaggatggtctcgatctcttgacctcatgatcctcccaccttagcctcccaaaatgctgggattacaggcgtgagccaccgcgcccggcctactcagtcttaaagaaggaggaggtcctgccctttgtcacaacagggttgaacctggaggacgctatgccaggggaaacaagccagacattaaagggaaataccacatgacctcacttatgggtggaacctgacgaaaaggtcaaacacgcagagaaggagaataatacagtggtcaccagaagtgaggagatggtggtggggaggaatgaggagctggaggtcagaggatgcaaagccgtgcacaagtaggcgagcgagttgagaggtccagtgctcagcatgaggactgaaggtcacacaatcataccgtgttggggattcctgctacattttagctgctcttgacacacacaaaacaaaacaaaacaaaaatatgggtaatcaggtgagatgatggatatgttaatttgcttcactatagtaaccattttactatctataacatctttttgtatgccttagacatactgttattattaatagtaacaaaaatctactggacacccacaggacattcacaatttgaatcaacaccagcattaaccttcaaattatgttaaataaaactttttatttaaaagtcttcattttaatacgctaaatattcagttactataaatagctactaaagtctggctgctcgagagatttcttgcatagcatatttatttcataatattaaaacttcatttcttcatttatgaactttattatcaaagtagagattttttgtccttttttaaatcaagagtgtgtaacaggaagctgagttttcctctcctctgtcccttcctcctgtcctcctcttgcttcttccctctccctcccttcctttgccttcaaagcacccatgcatttgtgcatatttttatttgtatccttaggtttgaagtttgctgctttcttctaatatcttggtgttagtcattcaaaacccttaataactaccatacctccaaaacagaattgttttctaagatgagttattgtaaatataaatcacagaaggaaagcatactttagatggacatgctacttttcttaaagatttacaattaaagatttacagtaaatacatgtcagctgttttaattttgatgtgtgttttgcttaatttattctcaattgagaaactttttctctcttggggcaaaaagtaacacattagatcagttagtaaatttcagaacaggatatgatgatagaatgaatgacagaagtagacagtagggtgtggtgtacagggatagggtgaagctgtgttttttttaattaacacataattgtacatatttatggggtacataatgatgcttcaatacatacaatttatagtgctcagatcaggataattatcatattcatcatctccaacatttattatttctttgtgttgggaatattcaatatgctctcttctagccatttgaaaataaacaatatattattgctaactatcattattctacagtgctatagaacactagaagtattcctcctatctagctgtaactgtgtatccttaaaaaaatctctccacatctctcttacctcctccccttcccaacatctagtaacctctattctactccttagttctatgagaccagcttccgcatatgagtgagaacatgcagtgtttaacttcctgggcctggctgacttcacttaaagtaatgtcctacaggttcacccactctgccacgaatgggagtgtttcattctgtgtgtggctgaatagtgctccactgtgtatatacaccacgttgtctttattcattcacctgttgtgggacacttagctttgttccgtatcttggctattgcaaatattgctacaattaacatggggtgcagatatatctttgacatactgattttcttccctttggataaaagtggcaggtttgccagaatcatatggtagttctatttttagtttttttgagaaagcccatatttttcatgttggctataccagtttacattaccaccagcagtgtgagtttcccttcctctgcaccctcaccaacatttgtcattttttggtctatttagtaataaccattctaaccgggataagataatatcttattgtggtttttatttgcattgccctgatgattagtgattttaagcattttttcatatatttagtcatttttcttcttttgagaaatgtctattcagctgatatgcatacttttcagtaggattatttgttttttgctgtcgagagatttgagttccttgtatatgctgatattaatcctttgtcaaatgaatagtttgaaaatattttctcccattccgtggcttgtctcttcactctgttgtttcctttgctgtgcagaacctttttagtttgatatatcccatttgtttatttttgcttttgttatctgtgtttttgaggttttatacaattttttctcagaccagtgtccagaaccattgcctctatttttatcatctagtcgttttatagttttgggtcttacatttagatctttgatctattttgagttgatttttttatacaaagtgagagatgggagtccagtttccttcttctgcaagtgaatagccagttctcccagcaccatttattgaagagaaaatgttctcaatgtatgttcttggtgcctttgtaaaaaaaaaaatcagttgtctgtagatacatggattaatatctgggatacttatcttgtttgattgctgtatctattttttgcctgtaccacgttgctttggttactatagctttataatataatcttaggaagtgtaatacctccaactttattcttgtttctcaggattgctttggctacttggggcttcatgtagttctgcgcaaattttacaattttcttttttatttctgtgaagaatgtcattggtattttgatagggtttgcatttaatttttagatcgctttggggagtatgttcatattaacagtcttgatttttccagtctgtgaacacgttatgtcattcctttgtgtcatcatcaattttttctatcagtgtttcatagttttccttgtagggatcttccatatccttggttaaatttattccaaggggtgtgtgtgtatgtgtgtatgtgtgtggctattgtaaatgggattggtttactgatttttttcagcaagttcattgttcgtacttagaacactattgatttctgtacgttgattttgtattctgtaactttactgaattcatttatcagtgctaagagttttttggtagaacctttaggtttttctatacaagatcatgtcatctgcaaaaagggacaatttgacttcctctttttcaacttggatgtcctttatttatttctcttgcctgagtgctctagctaggacttccagtactatgttgagtaagagtggtgagagtgggcatccttgttttgttccagatttcagcttttccattaagcataatgttagctgtgggtttgtcatatgtggcctttattgttttgaagtacttttcttctgtacctatttactgagagtttttgtcatgaagaagtgttaaattttattaaatgctttttttttctgaatctatttagatgatcatatggtttttaatttgccattctataaggaatgcaatttattcattttcgcatactgtgaataatggaatcaagattatatctcgagtctattcatttcaccatttggggctgtataaagacaaaattgctttttaaaaatgagcaaaataattatatacattttattatacatatgaatacataaaaaaatttgaaaaatgtattccatggatttgaatttacctttgtgttattatggaagttttcttctttcaacaggctttgcaacataatgaatatctgccttacacatttattcataactttcattatttctctttcgtttaagtgatgcctccatcaacacaaaatgcacagtacagaaatagtaagtgtttgataaatgaatacaagctctggtctccctgcttctctcagaccgtcacagtttaatctgagtttcctgtgccaactttcaatattgtttatatactgccatgatatggtggagggtgaaaactgtgttagaaactaggacttctgcttggtgttttcttgtggacaggttctgcactggactaacagacactggaaatcttctcgtccagggctgatagccatcagccaggatgagagtgcacagggaatgctcagtttgtcttttcacagccacttaatgtgactttctgttattccagttgattttttaaaaatgaaatctgcatttttgacttggaaactgttgggaaacaattcagtttatgattaggaaatgattactcatctacttccagtgctgaaggggagatcatacacctaggaataagtgtctagcctttccatcttcagagaaaaatgttatacagcagaggaatcgacctcgaataaacgacatatacattttatgcaggccattttcagaaagtaccaaaagtgagatgagacagttggttcttgagataagctaaaggatttgctattcgttcattcatttttctaagtcttctaacaaatgatttcctaagaaaactacaggtggttctcactatttagctcctctgcagaacatccttctttgacgctgttttagaaagtcactggcctttaccagaagtctttatgataaatgacaagatgaagtttgtatctgcatgtcctgcaaacatgcttttgaactcagtgtccattatggtacatcgtttcttttatataaaggtctatatcattatttgagaattccttcccagggaaatgtgtctcttctggtaaatagacacaaatatacaattttggataaatttggaaattaataatttcatcacggttgtctcatctgagacaaaccatagagccaaaccataaagtcaaataagaaggtcaagtttgtgaccgcattaatttaactttgtatgtattatttgtcattctaagtagtccttaatgttccatgttttaaatttagcaattgtaatatgcatataacttacggcatttcacctttaatccttttgaagtgaaactggaaacctcaaccacttctggttgtcatggtgttgagtagggcttggaggatttctgatgagctgtgcaatagactctgccatcaataatacatcattgcaaagtttattgagcctggacaatgtggcttcttatcatcaagagaatgcctttaaatacctctttaatattttataacatgtcatcttcatggaatttaatatataaaatatttgaaggtggtgttcacaagttgtaataaaaattcttgcaggccatacatgcacttaacatttgtagggagcaagtctacttcttattgtagagttcctgacaataagagttacaggcaaaagaactcattcatcttacattcttggccaaaaaacttaaaagccatatgtgcctgtcttatttttcttgcttgttttacacaatatgagcaatgaaagtatttctgagtctgtgagtctctggcttcctttactgcttctcctgagtaaataggctgtcactcatcatggacatggacatcccagattcatagatgacattctttggagccatttggtgaagtgacaacataattttttgcataattttttctagcaaactctgagaataaactcacagtttaaaaatagcaatatggtttcctcagttgaataaaaccaactaatgtatatgataaagaagataaattttaatttttcctttcagattaatgatattttacataataaaatctttttttgcattacaatttttccagctagaaaaattcaaaaagaactgtaacactgctgaaattattttaagaaatgacaattaaagttttctttttgatacatcatcacagtcgggctggtgggaactccatctagatggcttgtccatcctttcaacatttattccctctccccaagaactcctgcaaacattttattttatttaaaagaatgttccaggtccacatttttggagtaacctgagaaagtcttgtgcccaagtcacaaagcatgtatttcttgccaagaggcttgattcatttgctagagtacagtgttggagattaaaaactctgtgtagagaagcatttttcatggcccttcgtgatgagtcggtcatcactgggtactctgcagaggtaaagaaagtctgttgaaacttaggcgttcacattggcactgtcaatttagagtttcattcgccgcagatagctaaatcctgcagcctatcatcaataccatagtagtttttctatagttttgactaaatggtaataaaagcaaatttaatgacctttgttttatcaggtaacacaatgtaaattcaagcaatgattataggatttatacagtcaacaggagccccagacaagacacagccttgggccaaactgtaaagtgtcctgctaatgagatgcagtcagctttctgtggggttgacgcaggtttccaactgtaagacattctggtctgttaagatcatacatgcactgtctgatttattcctgggtgaatttgctgaagtcagttttaattagaagatgtgttttgactgacagttcttggtgtctgtgttcggctagtgtttctttcttggtagaaacatttaggtgctggagtgctattctttcttatcaggaggtaaaaaggcaatttaagttccagagtcatgctcaggggatggattcagccacaccctggcctgcggtgtgcaagcttcaagttgtttttggcaaatccatttgacttccatcctgtcagattatgtattttagtgatatccttggaatctacagatcgttaaagtgagctcttttgaaaatgagcacaaacatgggacacactattcatttccctcagtgtaaagtttcagagaaaatgcagaaactctcctgttcttctagttcacacctttatgagggtcccgtttaacctgtttgcaaatcctttttctttttttttcttttcttttttttttgtgagacagagtctcactctgttgcccaggctggagtgcagtggtgtgatctcagctcactgcaacctccacctcccgggttcacgtgattctcctgcctcagcctcctgagtagctgggactacaggcgacgccaccacgcccagctaagtttttgtatttttagtagagacgggatttcactgtgttagccaggatggtctcgatctcctgacctcgtgatccgcccgcctcagcctcccaaagtgctgggattataggcgtgagccaccgcacctggccactaatcctttttcttttgagctcttcacctaatgtgaaaatgtttccattacttgcacctatatcctaggctaacagcttttcactaaactatcaaatacacattctcatatggattttaatatagtctctgctacattgttttacaaaacaataagttgaactgtaaacttaaagtttcagaaatctttcattttaaaaataaaattagagcttatttaatcagataatctccatatatatgtgtgtgtatatatatgtgtatatatatgtgtatatatgtgtgtgtatatatatacacacacacacacacatacatacacacatacatgcacaggttgataggtttgacagcatgcatttaatctgcaacacccaagaacacaaatacattcagagccacggggaagttgagtaaaagcagcactcctttccagacgcctggaattgagtttgcagaaggtatgacttcagatcaccccagctgctcttgtttcgacaccacgcagactacttgtaaagaaaaaattctctcttgatgtaggcaattttcccttatgttttgtcatgttatcttttgattatgtgtcaaaagatcatgtgtcatcgtggtagtaagtaaacctcgattctgtttctaggttgtctgttctggaggcagtgggtagggattgagggggtgactctgagcggagttgcggggttggctgcaggtccgccgctgttaggcgggttagccatcctccactgtgtaagctgagtgtaagctgtggaagaagctgagccatgtgttagctgagtgtacatgatacgatccattaaccagactagaggaaacgcccactcaccctccctccagttttagagctaaacacctcccagggccccatgccctgcacctgccccttctctcctgagttcagtgagaaccatgcatttgcctttctctacagtttggccacatatgtgtccccaaacaacacattgtttagttttgcttggttttgaacgtcacagtaattaaagtcgtaccatatgtcttctttgccctacattctctgctcagtgtctaatcagacatgcacaggtgttgaattttgactctgaggcccagaattttcacctgtggggtgatgattatgccttacacatggggttgtgatgtggtttaaatacgtccataaggactatgaaggttgtctgacctgtaagaaatgctcagtaattttagtcattattaattcaaataaataataaaatctaactcagttaatattaagacttggtaacaaatattatcattatataacactacccacatgtatatatgaataaatatttaacagaagtgtctttacaaattctaattaattttcaagaaaacacaattatgttcacgataacacagttgtgttccaaaccttgattatattacctttacatgacctcagataaccctataattactttatcttgataaagcaagtataataaagtattacctcattacagcattttgcaggagtttgaatatttatatggattaaaatgcattatgctgtatttccattttgtataatgaggcagtggctgtattaccgtagggatgaactagaatcacttttcagctaaaatcaacaaaccttgcctaatctgaccaaatagttcattttatttaggatcactaattaaaatttcgaattaaaatcaagctttcatgattttattttatcacccattttaccactttttaattttttttaaggctaaaagtgtccgtcagctgaaacacatttcacagatttagttggaaagtatttgtaattacctttcatttaataactgggaatgactcttcttcctcctccctttcactgaaccaaaattgcttaagaagattggttttgtgtccggaattggtgggttcttggtctcactgacttcaagaatgaagccgcggaccctcgcggtgagtgttacagtaaagatggcgtgtccggagtttgttccttctgatgtttggatgtgtttagagtttcttccttctggtgggttcgtggtctcgctggctcaggagtgaagctgcagacctttgtggtgagtgttacagctcttaaggcggtgcgtctggagttgttggttcctccctgtgggtttgtggtctcgctggcttcaggagtgaagctggagacctttgcggtgagtgttacagctcataaaggcagcgtggacccaaagagtgagcagcagcaaatttattgcaaaaagcaaaagaacaaagcttccacagtgtggaaggggaccccagcgggttgccactggtggcgccgggatcctgcttttattctcttatctggccccacccacatcctgctgattggtccattttacatagagccgagtggtctgttttgacaggatgctgattggtgagtttacaatccctgagctagacacaaaggttctccacttccccactagattagctagatacagagtgtcgacacaaaggttctccaagtctccatcaggtagctagatacagagtgtcgattggtgcattcacaaaccctgagctagacacaggatgctgattggtgtgtttacaaaccttgagctagatacagagtgccgattggtgtatttacaatcccttagctagacataaaggttctccaaggccccaccagactcaggagcctagctggcttcacccagtggatcccccaccggggctgcaggtggagccgcctgccagtcctgcccctgcgcccgcactcctcagccattgggtggttgatgggactgggcacggtggagcagggggcgtcgctcgttggggaggctccagccgcacaggagcccacagagtgggggaggctcaggcatggcgggctgcaggtcccgagccctgccccgcggggaggcagctaaggccccgagagaaatcaagcgcaacaccggtgggccagaactgctgggggacccagtacaccctccgcagccgctggccagggggctaagcccctcattgagacagacgctgggctgcaattcatcgtcatctcattaaaccccaggccctgcaaaaaagtctgggtccagggaggctgctgacccatgggctcagcactgccctatgtgcgtttttctgatgtctggaggcggcttctgaccaactctagagcaaaatagacctcactgcgttagttccagacaagaaatggcagctccattctgaaaactctagataccattcttttctgggaatttggttatgcattttggtgcctggctctggacagtcatttttttctgctgttctgtaggatctcaggcacacatgtggcttgttgacaaaacaaaatgccactttttgctttaggttagaagagtcagatgcgtcttcattgaccttcattaaacaaagaggttaagtcatttactgtgtgattaccataggtatcattttaaaaacacattacctcggccaggcgtggtggctcacgcctgtaatcccagcactttgggaggccgaggcgggcagatcacctgaggtcaggagttcgagaccagcctggccaacatggcaaaaccacgtctctactaaaaatacaaaaaaattggcagggtgtggtggtgcatgtctgtaatcccagctacttgggaggctgaggcaaaagaatcgcttgaacccaggaggcagaggttgcagtgagccagggtcgcgccactgcacttcagactgggtgacaagtgcaagactctgtctcaaaacaaaacaaaaaaacaaagacattatctcctgcactggacttgttcaatgacaatgactactttccataagtagctaaagtttgttttgtaaaaatcaatgcgtctaaatgcacagagatttttattttctataggtccattcagaccatggggtaaaatactttgataagaacaaccttatccctatactgttagacaagctgaagcttagtttcccatgcgtcaggtaggtatttgataaagatggtgcttcttaaactaaatattgagaattatgatgattaattgatttggaccttgtttttatcatatgcaattttctgcacttttatagcatccatattaatgatatgatctatataatctctaccacatgtgtaatttcacatggaatccacatattctgtgtgtactttcttctgttagcctttgattcccttaaaatttaggtttgtaatgcttctgaggccccggcttgagagtccattattccagataatcaatacatgttttcaggatgcagcctaccctcgtgtggctagagaggggaacaacagcatgcgaagaactgagagacagagatagaaagagacagagagacacagagacagtgagagacaccgagagggaggggggcagtttgaacacagggagacggcgcaggggagaagagctgccaccaatgcatgggccacagcagctttgccatgcacagtttcggtgcaaatgagaactttgtttggatcgcttaacatcagtaccattgctgtacagaatcggtaccattacgtacactgatatgaaaactatagtttcaacatgatttaatatttgctaaacactagaagtaatatttagaattgacagttaatctgtatatagtttgtcaagagcattcccactttcaaagaacaggttattacttgttttccactatttaaacaaagatttaaaattgaaacaaacctatgtgaaggcaaaaattggggaaaaaagccttagcttttgtgcagagttgttcagttgtattgaatggggctctgtctgcctctctgacaatggaaaggttaagtgaaaacatgctgcatagattatagtcaaactttctcatacaaagtttttctctttgttgcctttaatattctaggtacagttgttttgatcagagccgtctctgtacgtttgcttatgagaatgaggggaaatgctaagtggctgagggaattccttgtttattgcacacttaacgaaaaatgtgcatcagactttccatatcctgtaatgaaaccctttgttacgaggaagtgacattcgttttccacactaaacaagtcttctgtgactggaaggcagctctcttaatgcacgtaaatcaatctagctttccttatgaagaggccaatctagctttccttatgaagtggccgcctattgctatgtgttcacatttcccacacccctgtggacacatgcacacacacatccatggcacacacatcaacagattcacatgctcagacttgcaaatacccgtgcatgccgcccacacccacgcatgcacacccatctgcacctgcacacacacacatctcacgtggacacatgcacacacacatccatgtgtacacacaggcatgcacatatcaacagatccacacactcagactcgcaaatacccatgcatgccacccacacccacacatgcacacacatgcatacattcacacccatctgcacctgcacacacaaacacacatctgctcacgtggacacatgcacacacacacacacgtggccacttcagctactgcaagccctgtgcttaaatgactgtcataacaaagcatgtcactgagatttctcttaaaactgttgccacttttgccaccctgcagctgaccagacagggatgttgttcgtaggagatgctgttctccaggtcagtattgtacacgttaatccttaacttgattgcatttttatttttaacttgtattaatcaatcgttattctcaacattcttactttgtcatctgttcaggttaatggcatacatgtagaaaatgcaactcatgaagaagtggtaagtgaattacattttatagttattctgtttattattcttgtatttgaattatttgtctctatagttgatatttcactgagtctatccatagatgcagtgttagaattggaaagaaagctcaaaggtttagtaaatcatgttacaaaaggaccttaataaactgcccactgtcgactgttgtgtgctgactggggcacttcacgagcattcctgtcagggatcctcacaaacgctgtaaaatacacttgatgaagcccatgttagagcactggaactcagggagcaggtgactcacccgggattcctgaagtgttatcatcgtgctgagcacaggaggtgtcagggcttcacagggtctccccgtaccgcccgggcgctggagcctgcagggccttcacgcctttgctccctgttggctggcagcagcacacgtgcatagaatgtgtgccgtggaggacaccaggtgagacctctgaggatcacataagatggtgggggtcaggatgcattcggtgcaggatgctttccatggagatgagctttctccaatgtcacgtcaggttaggcggatgaaacagacgtctatccccgaggtactcattctggctgttgggaagagagaagccgagtgcagcctcaccatagggctgatgccaggaagcatgtggtggggacgcgtggtcagtctggtgcctgtggggtgggggcggaggtggagacagtattacagctgagagatgaggtggagggcgaagcgggtgagatgacgggcagagcagtccctgtgctgataagtgacctgggggacacagggtcaaggggagaggcagtggagccgagtccaggacacacgcctggggcccaaggtagccagcagagccctcacgggagtttaattctgtgagttgcagcaaaaggcaagcaggctggtaatttaacttgtcccacgaagattaataggcatgcactcatttcttcttcagtgtttatcttttcaattagccaactcttagttccaaggaagggcaaacagccctagtacccaaaagtcaccccatctgcatagcagtaaatttccgtgaaaccaaggcaggcacacgcagcagtctgtaactaaacggggaatcacttcctacacgctcactcagaattcatctgtgtcttcattcaagatgtgtagttatcgacctctaatttgtgctaggcagaggaaggagtcacaacaacaaggatcagcatatttcttggcctccaaagccaaaaagtctcgagtagatgaagtgctgttatccttttgcttattgtgggaaaacacatcacaattgatagagaggcaagacacaccttcatgacttctatcctagcccagagagagtaaaattcttgtgagcaacagtttttttgtttgtttgtttgttttgtttcattttgtttttgagacagagtcttgttctgtcgcccagtgtagagtgcagtggcataatctcggctcaccgtaacctccgcctcccgggttcaagcaactctgcctgcctcagcctcccaaggagctgggattatagacgcccaccaccatgcctggttaatttttgtagttttttttagtagagatggggttttgccattttggccaggctggtcttgaactcctgacctcaggtgatctgcccaccctggcctctcaaagtgctgggattacaggtgtgagctgccacactcggccacaacaaatttttgcaccagttgctcacaactgtaatccaagcactttgggaggcctagacaggaggatcacttgaggccagaggttcaagtccagcctgggcaacatagcaggacctgtctctacaaaaaataaaaacaaaatctagtcaggcatggtggcgcatacctgtagccccagctacttaggaggctgaggtgggaggatcacttgagccaaggagtttgaggctgcatgagctattatggctccctacactgcagtctgggcaatagaatgagactccatctcaaaaaaaaaaaaaaaaaaaaaaaaatcctagtaaattatatgtaaatcttataaatggagctattacaatattggactgatacaaatatactttttgaaccagactgatcatatcatatgtttacattcttatgtgatacaaaataaattattagagaaatgctaatgagacataaaatctcaatttttccgatgcataaagttcattaaaatgctaaaattctaaaagacgtataaatcatatggtttcacttcctcatttttcagagtaaattctggcttcaattaattctaaaagaaaaatgtcagttgtactgaatgcaaagaatcctttgtaatataaaaactagatttacctccacaaagtgaatcttattcactctactgctttggaaaattttactactttaagttgttaaaacatcttaatacacatacatgcatatacattaacatatagtttcccctttttagtacatctatgcattttcatccacactggcatataatactgtagccagctacagccgagtaaactgtccgtatgttcactgggcaaattctgagacatgtctctcttcagagaaaaagggagatcgatgacggctgtcactcagtgtgacatccctgcgcagacacagattgggatgtctcgggggcgggcagcaggagctgccggttcctctcgtacctgtacctggtctgtgatgggaccactgatcccgagtgaggcgctctgggaggtggtgggctgctctccagcgcccccacaggcagggcgcagaacaacagcctggcagggccacagcgaggctggtgtgttctgcctgtaatcaccccaggatatctcagcgcaagaagctttacagaatgtcatttttctccagttcagtgggaaattttaaaaagacgtctcaaatgttaaagtaagatactgtaatagaaaatcacttctagtctaagttacagtctaagttcttaagtgctatgaaaaccattgataaaaattgacctaattggaaaaaaaaagtcactaacacctttcacggagctacccttttaaatttaaattagtccttttaaaaaacacgtttcagtcacctataatagcttttactatgattacgaactcatggcagatcctgcctgtaggtgattttgaacttaactgttagaaataaagttgacatcttatgttgggaaaaatggtgtggacactctgagcaggaaggaaccttccaaatcatctattttgaacagcaggtcagggtgggaagccccattcacagaaattggctctgacagtttactcagcagaccatggggacttcattccatgttagcagaagaaggggttcctaatacagagctgaagcttgctttcctgttacgccaggttttccatttaatgacatgtgttatggttaatactgaaacaggacgttacatcctgtgtaagcaaggcctttttcctcaagaatgagtacgttctggcttcggtgccggaacacaaagtatgctattgccattcaaaggcaggctgtttctggcgatgtgtgctaacagctagaaactgcaggagaaagaatcactggccattttcatagctgtttaccaggtatcagggacgtttttgatttgctctgggatacagaacacatctgggacaatagctggaactggagttccatctgttgatatttacaatagagcactcccttgctaataatttatttgctttttgcctgagccaagaggcaatcgaaagaaatggaataaaatttacctcctccacatctttcaagttttccctacagcatggcttttggttttccgttttccaaaggaaaagccattctaggatgtccagtcacccaaccatgatgggcctgaatccaggggtccagacaccaacgtggaggttccaccagtaggacacatatctgttcagctctgtactcaggggagttaaagagccccaaggcgtgtttggggccctgagacaagtgtgggatgagtccgagacaaaggcagctgtcccccgacccacattagtcccacattgtgacaggggccatggcaggcactggggctccaaggacgtggcatcgccccagagccagggtccagcagcattttttgtccaccactcatagatgtgaatctctgctttacggaggctaacagggagatctgcagtacaaagagttggtgggctttcctcaaacagacttggacttccctttattcagggctgctgttctgggaactgactctctccctgaaattgattgagagcccaggcctctttactgtggtaagtccagtctctatccacctgacctggagatttttcacctacgcaaatcaattgcaactgcaatgtattccccatctatttcaaacctaagagctccatgatcaattagccatggctagatagatctgcaggtcaaaccatcagccctgccacccatgaagggaaccaacgcacctgatctgaaggttcagtgctgctgcctgggctctgccatcccgtccagggtccaccatccctttggattccaggagccaccttcagtggtggcatagcccagtaccatgcctgctcagcaggaaagtgccacagcagagttcctgggatggtggagccttcctcacttagggttttttcaatttttttggcaaagaaatgaatgtagattcagcaagggagcaggtatgggagtatgcaccctacttccataaccctttgaattccttctgggaccacacaccaaggaagctatggcaactcaaccacacttagtgtggccactgtgagtcctgatgttagtcaactaaccaaggaaaccaatagagtctctctcaagtaattaaacaaattcaatccagaatctctactcattcaattcagaatctccagtcattcaatccagaatctctagtcattgcacccatattaatacatttggtctaatccaacagaggattctacaaccctaaacacatactcccatgcacaatcaaaagttcatttctgccattgtcatgaccattgcattgcaattctttagatatgcatgggatagcttttctgaaattaggcttcataataagatttggggctagttatgagactagaaatatggggagtggccagatgcatattgaggaaagtcagcattgtcctgctaaattgttgcctcagaaaacataattctaggacctctgggcaacagtgactgccgataggggaggaaggggaaggaaagtcagtaggatatgaatgtgcaaaagggacacagacatgctgggatctgttctcattcccactctttgcccatcaatgccctaactgtagagagactcactgcctgatagatagaattactcagccacctgcaaaatcagatatgggcttgagttttcagaagtcttaactctgtagttataagaaataaggaatcatttcagggaaatcctgaagctctctagcactccactcatgccttaaagtggaaacatgagtccctgggccttgtcattgtctttctccatgttctccactgcagctttaagcagccctctgcccttatccaacactaaactctacccactaggattttgtcaggaaaatgggagcagctccaggaattctagctgtaacagtttgaagatggggataaacgggttcttaccaagttgggattgctggaatgcaaagggcagagagtctgccgtcgaaaatatgatatttggccaatgtcagtgactcactcctgtaatcccagcaactttgggaggccgaggcaggtggattacttaaggtcaggagttcgaggccagcctggtcaacatggtgaaaccccatctctattaaaatacaaaaaaacattagctgggaatggtggcggatgcctgtaatcccagctacttgggaggctgaggcaggagaattgcttgagcccgggaggcagaggctgcagtgagcagagatcatgccactgcactccagcctgggcgacagagcgagactctgtctcaaacaacaaacaacccccccccagaaaaagaaaatattatattcaaaaactataaaactgtcagttcttaagaggaaaaaaaacagaaatttattgcaattctcatgaaaactctggaacgcttgcacatctcccacagttgacagtgttgaagctgtggctctcaggacacgctgggtagccccatagatccatctacccaagggtgtgcttatctgacttcaaaaacggttgacatctcctctttacctcctaaatctttaatgagtttctttcagcaaactctcaccccgagacatatgggaaaggatctggagaaacatagaacctggtttctctttctgctttgagaagggaaatggagggttgctgagttgacaacggacaacccaccagccttaagagtgcaactggccagaaatggatagacccaccagacagaaatcagaaaggacataacaaatttcaacagcatcatcaatccactgcatataatggacatctacagactacttcacccgacaacagcagaataacattcttctgaagatcacatgaagaattcaccaagacagaccacattctgggccataaaaacacattttaacgaatttaaagaacagatattgtatcagtctgtttgcacattgctgatgaagacatacctgagactaggtaatttataaagaaaaagaggcttaatagattcacacttctacgtggctggggaggcctcagaatcatggtggaaggcgaaaggcacatcttacatggtggcagacaaaagagaatgagaaacaagcaaaaggggtttccccttataaaactgtcagatctcatgagacttattcactaccacaagaacagtatggaggaaactgccaccatgattcaattacctcccaccaggtccctcccgtaacacatgggaattatgggagctacaatccaagatgagatttgggtggggacacagccaaaccatatcagatactgtacagtgtctgctcttaaaccaaaatggagttaaactagagatcaataacagatagctgggaagtcacaaaatgcttggagaataaacagtacgcttctaaataacacactggtcaaagaagaaatctcaatagaaatcttaaaaatattttcaactaaaaataatacaacttatcaaaatttgtgggatgcagtgaaagcagtgataagaaagaaatatatagaattgaaagcatatattagaagaaatgtcaaaataatttttttttcaacagcaggagtttatttccccaaagctctaagctttccccttaggaaaccagaaaaagagaagcaatttaaacccaatgtaagtagaggaaaataaatgatgaaaattagagaagaaatcagggactgaagacaggaaatcaagataggaaaaaaaaagctgtttctttgtaaatataaataaacttataagccaatagccaggctacatatgcaaagagagaacacaagttaataatattagaaatcaaagagaggatattactatagatcctatggacatgacatacacctctatgctgacaaatttgataacctggataaaatgcaccaattccttaaaaaacacaatctgcaaaaacttacacaataaaatgcagtctagattggcctacatctattaaatgaattaaatcaatagttaataactttctcaaacagaaagtgccaggccagacgggttccctggtgagttctaccaaacattacagcagaaattataccaattgtctacaatcactttcagagaacagaagcagaaggaacacttcctagtgcattccatgaggccagctttatcacaataccaaaaccagatgaagacattatgagaaaagaaaattatagaccaatatgtctcatgaacatagatgcaaaaaatcctcaacaaaatattagcaaatggaattcagcaacgtctaaaaagaattacacaccacaaccaagtgggattttttgcagctatgcaagactagttcagcatttggaaattaatgtaatttatcacattaacaaactaaagaagaaaaccctaatgatcatataaatggatgcaggaaaagcattccacaaaacccaacatccatttatgatataaactctcagtaagctaacagtagagaaggacctccttaactcgataaagattaactgcaaaaaatcccacagctaacatcatagataatggtgagaaactagatgatttcccaccaagatcaggaacaatacaaggatgtctcttctcatcagttcttttcaacaccatactgaaagtccttggatgtggaatgcaaggttatttattatatacaatttaattgccttgcttggtaccagaaatgaaaaactggactttgaaatttaaaaagcacaataccatttacattagcactaaaagaaataaattacttaggtgtaaatataacaaaatatgtataatgtttaaatgaggtgaactacaaaattgatgaaagaaatcatagaaaaaaattaatgaagaagatagtctatgttcatgaatagggagactcaatattgttaagatttcagttctctccaacttgatctgtagattcaatatgatatcaaccaaaattctagcaaaaagttttgtggatattgacaaattgagtctaaagtttatatggagatggaaagactagaatagccaatgcagtattgaagtagaacaaagtttgaggcttgacacttcctgattataagacttactataaagctaatttaatcaagacagtgtggtattggtgcaagaatagacaaatagattaatggaatgtaatagcccagaaatagaaccacataaatatagtcaacttctctttcacagaagagcaaaaacattataatggggaaaaggcagtcttcaacaaatggacatctacatgtacaaaaatgaatctagacatagaccttacaccctccctaaaaatggaggaccacgggaccagctgcagaaatgagaactgtaattgtcatgagtatttcctcctccttttgttaaaagcatgtttgtgcatgtatacacttgtactaagaaaatgtcttcactttatttcctttctcctttatcatgtgacataagatttattgacttcatatcagcatttaagtattgttaactttatataatagcatttgagttggggattggtgtatttccagttgtacaaaggatagttgtattatgttaggtataattataacctcattattgtctatatttgaggactatttttgatctcaggagatgtatatggattcaaattgacaagggttgggcttgtgatggttaatactgagtgtcaacttgattggattgaaggatgcaaattattgatcctcagtgtgtctgtgagggtgttgccaaaggagattaatatttgagtcagtgggctgggaaaggcagactcactcttaatttgggtgagcaccatctcatcagctgccagcatagccagaatataaagcaggcagaaaaatgtgaaaagcctagattggcctagcctcccagcctacatctttctcccatgctggatgcttcctgcccttgaacatcagacttcaagttcttcagctttggaactcagactggcttccttgctcctcagcatgcagatggcctattgtgggaccttgtgattgtgtgagttaatactccttaataaactccccttactatgtacatctatcctattagttctgtacctctagagaaccctgacaaatacccaagtatggggggtaagagtcaccaagaaaatctgcagataatgatgtcagtgattccacacagggaaggaaatctttgatagtcaacagagtgaggctaatgactagctacagttgtgtggcatgaaatgcggtgttgcccagacatgattgttccatgtgaaagtaattatcttcacaaatattattccgaaaacattgctgctaataaccattaattttaagtatatgcaattttcagaggcagttgaagcaatagaggtctgaatgtgattttaaaagaagagagccaattacttgaagaattcatctgtttttgcattataaggaccgaagtagtaaccttgtctggaagagagggtgctggaatgaatgagctggtggttgcatttttctggctccttgttggcttcctctagatggagcagtactcactgctggaaaatcaatcccaggagctggtacaatttcagggggccctgcaagagggtcagatcagtgagagcagaaacattgtgaggctctgtcattccaaatgaaagtgttggaaaactgtgaaatacggaatggccttagtgatttcctggttggtcccactccttatttcccacatggagaagagagggcctggcccactccttatttctcacatggagaagagagggcctggcagcttttcatgtttgccagggacatgaaggcgacatcacctcgtgttcccagggcagcccaggtgcatgcttcacagaagtgggaacccagagctggggaggctgcggggctgctgtgctgctgctgtgtgtgttttgtgttaggcccagcaccaggctgagcaggagtcagctaaggacctgcctgtgagctcttcatgctgaagatgccagcttgctattgccctcactactgacctgtgtgttactgtgttacctgacactaagcctgagctcccggggcgggatgcacctgtggtttggaaagggttccccccgctccttgtgtgatcacccagatgatgaagccagcatgaaatgagagtgaacatgtggaggggttgctctcttgaggccctttggatgttcttccaagccggacccacatagaggggctttcaagagtgaaggaatggaaacaaggaagtgaggagagaaggtgaaggtggagggaagggaggaggcgccttcctgctgggcccaccctctgcaggtgcctcctgccctggtgtcacagcctggcaggtacaccctctgcagatgaaagggacaggagtctcgaggtttcacagctgcttgatgcttctgtgcatcgcccctttccctaaaaataacaaacagtgactgttgtcaggtaccatggagtgtaccccagggttacaaaattattccctggaaggtatttaaaacgagtcttgtggacatgagtttggaaagcaaagtaaattctggattccatggttcatacaccaggggtcgctgggcaagttggcagttagattgaaattaaaacatacatgttcttcttgtcggacgtgtgtgtgtgtgtgtgagagagagacacacacacacggggagcagtgaggcttacaggtggggagggtgagagtttgtcaatgagattgtgtggaggttgcagctctgggaattgccccatagctgagctaagtttgtcttttcattgtacaaaggaagagatactgaaagtggccaaggattgtgaataggattagaaaaaaggacagttgtgaatacacacaggagaaaggaagcaacagcatcggaagattaaaactctactcagggttttgccgcttattttcgtccatgagcatattacaaaattaccaagacctctgtgggttaatctgtaaactcaagtcctaatgtgcttttccctgcaagaatctatgagcagcagtggtttggaaaaatctatccaccatgtcttttctaggttcaggtggtaacattattcctacccaccctcaacagattgatgaagttgattagcgtttttttttttttttttttttttttttttttttcaaatggaatctggctctgttgcccaggctggagtgcagtggtgcaatcttggctcactgcaagctccgcctcccgggttcacgccatgctcctgcctcaggctcccgagtagctgggactacaggctcccgccaccgcgcctggctaatttttttgtatttttagtagagacggggtttcaccatgttagccaggatggtctcaatctcctgaccttgtgatccacccgcctcggcctcccaaagtgctggaattacaggcctgagccaccgcgcccagctgaagttgattagcttttcatttggcactcctccgttattaaaattgcactcacagatgaaataatgttctttaaatatttcacaatcacagatctctgagcgaatggtgacttaatttaacagcaagcatttgaaggtttagggaactattttgagaggctgttttaaaatgcagggatcttgggaaagggaatccctggtggaggtctgtgtggaaccccattctcatagttctagtgttctaacaagcaaacacagctgtcatctccacttgcctcctagagatctgtgggcagtgctaacaagcatcttactttgtatctattggggatcgaaaaggctgtctgtcactcatgagtgagtgaaatgtataaaagtaaatttagctgtttgcagcccataaagctggctttccctgccacagcaccagtgggcaggcctgggcacacatctgcatgagacatttcattggctctaattggtgggtgacgtgcagcccagagggtcttccctgggggcttggtgtgcgcctcctgatgtatggccaggaggacagagcaggatggggtcaggccaagatgaatggggaggagatgtttttctgttgtgagagagcaaaacatgcttatggaattcagttgacaaaagtaaaggggcatcctgtgaagtttacttaaggacacagagagatggaagtacgacccactcagcagcaaatgtcgtgttagagtataaaggtcagaatttagagggtcagtatctatgcctgagagacttcagccttttctagttgtggaacagaagttgtcaagggaagaccagacctctcatgaatagccctgtgtggaggcagctggggtcggctctgtcccggggacttgcctggagctgggctccctccgtgtgcccagagcagccatgcggctgctgaaccgagctccaaccccacagagcctcattctcacctgtgctgtccctggtgggttgtggtttgggctcagtgactgacactctctgggtgatgcatttgatttgtcaaatttgggagtggttttgtcaaaacctctaattaccactgagttggaaaagtatagaatatatggtatgacgaacagtggaaagtatcagtgaaagtgcatgattttggaagaaacaagccttaactgcacagttactgttccttcaattgttctcatattgtggaaatgagctctgtcttcagcccaaatgtaaggcatgtgcaggctgaaatcaggctgcggtcccatctgtgccagctctggagtcaaggtgtgctcaggaccctggtgccggcgggctgcctccggggggtgtcccactcctgtgcacagcagagggctttgtcgtttgttgttggtttgttggtggtgctttgttgtttgttgcttgtttggctcaaacatttcctaatgttttgttttcccggtgctaccttctgataaatgttgagacccttctgcctgtttccaaacccagcctcgctctttctgcaggaacaccagacaccaaactgcagctttccccctagattgaagcgcgatgcccacgtgcgccccttgcttgtgacctctgcatgtttcttccactctaggaaccttcaatgctttcctgttcatatttagatttttatgacttatattattctttaggctgctccgaaagcctttgcgtcctggatttgctgcgcgccctttgcccgtgcgtgccgtgcttctcatcactttgttactttcatgaacctggtgacgatgcagatgagcacagctgctcacactctgcagggcacctgctcacatgattttacctaatcctcatagcgactggagaaaatgggtgactagcactcgtgtgtaagtggcataaattgggttttcaagagcactaagcatcagaactaagaattgaaaacagatttgctcaattctaagtcatttctactataatatactcaatttaccaaattctcaaagatatctagagaacaattcaaatattaaatacgtaagcatttatggtccttcatttgctaaccacataatagaattttgttttgttttgttttacacatcatgtgtagttctggcattatttatctggattataaagagatcatcaatgtgctgactcctaattagatggttacaggccaggcaatcagtcaatcatggtgtccactctcgaattgtgtgaagatgtagggtagagcaattagtcttcagttcaaattatggacaatctaccactcttatttcaggtattatttgatgatagctgatataggattggttagggctccaccaaagaaacagagcgagtaggaaagatattgggtacacatgtgtatacatgtttgtgcacatgcatgtacgtgtgaggccgtgtgcatgctggtgtgcatatacatgtgtacctgtgtgtactgcatatatgtgtgcacatccaggggcatgtgcagtatgtgcttatgtctgcatgtgcatggatgcgtatattcggtgtgtgtgtacatgtgtgtgcatgtgtattcatgtgtgcacacacgtatgtttctaggtgtgcacatgtgcatgtgtgtgtgtgcacatgtgcatgtgtgtatgtgtgcacatgtatgcatctgtgtgtgtttgtgtgtaacatttgtagttcaggacctcagtctgcaaactcctgagaggatctgagcctttatccggcaggtagattttctttttcctcagagaaatctcacgttttgatcttaaggacccaacttacattattgagggtaatttcatttacttaaagttaactgatcatagatgttgaccacatctataaaatgccttcacaaggccaggcatggtggctcatgcctgtaatcccagcactttgggaggccaaggtgggcggatctcctgaggtcaggagttcgagaccagcctggccaacatggcaaaaccctgtctctagtaaaaatacaaaaattagctgggtgtggtggcgggcgcctgtgattctagctactcaggaggctgaggtgggagaattgcttgaacccaggaggcggaggttgcagtgagtcgagatcgcaccattgcactccagcctgggcaacaacagctgaactccatctcaaaaaaaaaaaaaatgccttcacaacaacacctagactggtgtttggttgaataactgggcactgcccagccaagttgaccacaggaaactaacatttatagccagtaagaaaccgtgacatcttttttttattatccatttttttattatactttaaagttttagggtacatgtgcacaacgtgcaggttagttacatatgtatatgtgtgccatgctggtatgctgcacccattaacccttgttacatgatgtttattttaaaatatgtgaaggaaaagatccacattttagaagattgcattatcgttgttcgaatgacacatcaaaaggatctgcctctgaattataaagaaaatattatatgattaggaatgtcagtaaaatgtctaaaaagtgcgtacacagtcatctcatgcccagggatggtgattccacaaagggaaagcctcacggaaaagcttaaatgcacttgtctaagtgcatagagtgacttaaattctgtgaatttaattattccctggcaataacttgttcgtgttttacacataatctctccaaagacaagtggataataactaattgcacggagcagtaaaatgcaggttatttaaggaaaaaaacactattgatgctgaaaatgttagctgtttctcaatgcgggtgatggaagactgaatacattttcctaacttcgaacaaaaatcaaagtgcatcagcttgggcacaatgcccacgagagctggcctgaggttggcaactgctaaaatagggacttagctgtgccagagtgcagatgtggcttctgggtggagatgtgtatttaagatccaaccaagaggacttccaggaaccagctatgaaatacaaaagtcgaatagaaatctcttgcaaaacagaatgttacttatataagcaaaaaacaggaaatcttaaaagtttcagaaaaccttagcagatgcaaagtgtcttgagccaatgaggaagagggcagggagccaacaggaagcttgatgggagcacagggaaagggcgcgggcggggagaggcgggaggagcatggttggggggagaagggcccagccccatggaggctgacattagggaccaccagaggcactggctgcagctgccatcacatgcagctgaggcgctggcacgggcgtggagatggcatcttcccggagggtccagttgtgctgcctgtccttccagttttaaggcgagcgggatgggacgccaaagcacacagctttctgtcggaagatgttgaataagattgagattatgaatgaaaacttaaaagttaacaatttataaaatagaaagttctacatatatgttgaaaaacgctgatgagaagttgggtgaaggagcaagtgtgacagacacaatgtaggccggataaaatgaacagcaaaagggcacaagaagagaaaaagtgagggatggagcacctgcagcagcgtgacagtgacaacttgtcattgaattattctggaagtttactgaaattctcatcaaataccaccgcatgtctaatggatcagtaaactccataaattaaaataccgtagcagtaagtgtaaatgagattaattccccctatttaaggaaaatggactctcctactggctgagaaactcagagcccaccttccttctacctccaacacatacatcccacacatatcacatacaccacacatatacacacacacaaacaacacatagacatgcacacaccacacaaacacaccacacacacaaagacacataccacatacacacacacaacacaaaaacatacacaccacacacataaactcacaccacacacaaagacatataccacatacaccacacatatacacacacacaaacaacacatagtcatacaccacacataccacacatacacaccacacacataaacacaaaccacacacacagcacacacaccatacattaaacatacacacataacacccacatatacatacaacacaaacacacagacacactccatacacacacacacgtagaccccccccccacacacatatatagaccacacacacccacaccacacacataaacaccatgcaaatatatatggacatacacacaccacacacacatacccacaccccacataacatacacatacccacatgtacacacacattcacaccacatgcatatacacatatgcacaccacacacaccacacacacatgtccctcatcacagacacgtgtacacatacaccacatatacatgccccacatcacacacacgtgtacacacaccacatatgtacacacacaccagacacaagcatattccgtctaccagagaaatactacagccagtaatttcagaaggttaatacagaaaggagaggcagcaatttcagtgcaagtccaaatttcagggctgagctcagagcccctggggccatgtgtgcaacaatctggacgtcagccctggccgtggtggtgggtgccagtgagagagacggccacctgcaagtgcctctcccattgcttgggggacctgctgctgggcaaagcggggctctgagaaggcttcccaatcacccccaagcttggggctgaggaaagagcttcgtggaggtgccagcttttgaggtgggcggcacaggctgaagatctaacgtgggaggggtgcaggcacgtgtggacttaggagccctggactggaagtgagtgtgtaggggtgatggccacacagagtgtgcaatcaaggaatgcaagcgctgctccccatggaccccagcgttcagagctcaggaagcagagcagggccagcagacagaggggacacccagaaggccaggccaggccaggccaggacaccgcagacaaaggaaccccgccgaggagacaacagcaagagaccaaggggtagatggagcacaaacaagttcttaaaagcattttgctgtggaagggaacagagaaatggcacagggccgcccgtggatgttgcactaaggaagggtttcatggtagaagggttccctggcaaggactactctgaagggaaggaagccacataaaggaaacattgtgatgtaggacgaggcgaatgcatggggcagaggctcaaagggagggattcctgtggccttagatagatcgagggcagctcttttgttgggggggatggggagacagaacaggcctcagacacggcaagtcggcagatcaggagtacacagatgttcacttttatttgcacagtgaactgagagctgtgatcagcagctgaacaggtggaggcttcagtgaagagaaggaaggaaacacccatcttgggatagggagggaaaacaggttgaggcgtgtcctgccctgcgctagagtccccagaggatgaaccgtcatgaatttagagattaaccagccagcacttaacgtttttctccagccacagagtgcagccagggtgcagccacagagcgggaagagacctggagttaagtcccttgtttctgaaccagtgaccatgacaggtgagggcagaaggacgagggaccaggggttcggtttgaggaggaggcagtgaggtcccggctggagacagtaaggtgatgctcgggctgtcatttgagacgtgggtggctgagccctgcctgcgtgggggtaggaaatgaacgggcctgcggtgaaagaggacccaagatgctcagaataaagattccagcgcagggcggcaactcttggtgaaacagaggtttccacggtgattggatgtgtggctgaggaaggtggacagtgagacccttggaggccaatctgggcatcttaaactccttccctggttatccatagaaatatgaatccccagggaatgcagacaggaaaagtcatttgctccaggaagctgcaggtccctgcatggattcactcagcataccccatgtgcacttcaatcccgtacattactgtttagcagaaatagtcaaaactcggcttcttcctgactcggccccttcctcacctcaccttcctttcccctccatcccatcactgccagcaccctgcagagtggccaccagtgctgatccactggatgtgtcactagagacttggtaagtttggcaggaatcatcgagtcctgccctggctctacccctgacccctgcagaacccagaggtgcagctgaagtgcaccccggcactgcggcttgtgcgctgaatgcaccccggcaccgcggctcgtgcgctggagtgcaaccagtactgtggcttgtgcgtacttggcaaaagccccccagacactcacacgtgcacaaggatgccagacaggagggacggtgtccacgaagaggccttcacacttagaaaaagtccagggctgtgcacgtccctcacatccataagtaggttccttatgtataacagagactgggtttcaatgttgaaaggatactggcaactagaatgcaagctcattaagaatgaagagtttcataggctaaggtctgtttctttattaacatagtgtatttaagcagaaatgagttaagtcattttctatagagaactacagtggagtttttctctgttgaggtcacagaattttttcagactctggaaataactcagcttctggtgtgcacagactagagatgtgctgtaggaatgtgctcagcctgccccgcgggtgatatgagcccagcaccgcaatgctctgggaggttttggaaggattctaaagctatagatggatattttatgcatcacttaataagggagaaggagtttgccttaggcagttttctttaaaagtctcattgctctaggcacaaaagttagcatttcaaagttaccttggccggccggcaggtttggtacggggcatcctgtagacatgcctagcagcacacactcaggtgggggctcatggtgattagtagattcagcatcatgctcaaagggcccagttgcataaactgttttttgtcttaaatgatgtgctgctgactatggcagtatgtaaggatacttgaatcatttctaataaaatataataaaagtatcctggttttaaaactaatttaggggagttattcataaattaaaccttccctttactcactcaagttcatgtgaaggaagcatttaaaaatttacatagaaaagtagaaaattattattttttaaaatttatctacatctgagtacactatgagaagtggttcaaggaaagaggatgaattagtgggatgtgactgtccacagggactccccatttctggtgggggaggagatgcagaggagactcctgtgtgtttagcgtggcatcaggtgcctggctcctgggcttagcttctgtaaaagagaagaagtgagaaagaaagaagaatattcatgacaattgaataacacatcagtgcacatttccaaatcatgtttcaagtgacctatgtgtaagcacgccaaagtgtatcttctggggaggtgcatttcaccatggttgggatttggggcagttaggcacagcacggccaggggtgtgagagaattaaaggtgtgtgcagggaagggttacagtgatggatcttggaatttagcctgaataaaggggaatgtaaggctgcggcatggtgagaacaagagagagcgctgtcgttgccaatcgtggtaagtctccatagggctgcagtgtcgtgtgtgcaggaaggctttacggagcacaccggaagacaggaatggtagttgggtgcttgatttaaagtacagaacccttgcagatgttgacaacagcaaggtctaatgcaaggtcttggaatgtgttactaaagtggggcgtatggcagatcgtagaggagaggaagtcagcttgtggatgtccgtgtgtgtgtccatatgtgtgcatgtgtgtgcatgtatgtgtccacgggtgtacctgtgtgtgcacgtgtgtccgtgtgtatgtgcatgcgtgtacctgtgtgttcgtgtgtgtgtatgcatgggtgtgcatatgtggggggggtgtgtgagtgcatgagtgcgtatgtggaattacgtctgaatgtatgagtgcatgagtgtttatgtgggagggtgtgtgtgagtgtgtgtgtgtgtatgcaggtgtgtgtgcatgtgtgtgtatgtggggggtgtatatgtgtgactgtgtttgttctcatgggtctttattcaacataaactcacattttttttccagaacacgtggggcattaacaattatttaggccacaaggaacccaagaagaaacgcaacacagatgatatctagtaaacaaaatgacaaatgcttttaaaaatatccacacttctggaaactgtaaaaatagctatactggtgtaaaaagacaatataaaggaaaaaatacacaatagtaacgtgaaaaatattgaagaactttgtatcaaaattcgtcgaatacaagtagggcttaagggaagactggtaatttgtagatatgtttattagaaaacaagaaagcaaaggaaaaagagccatgttgtcacctaagaatctgaagcaagagcaacagagaagcccgcaggagcaaaaaaagaaagaaataataaaaatgaagatgcgaatttgtagaagagaaaacatagaggacaagtcagagaaaataatactaaaactccgtctcccaaggtgggcttgtaataacgcaagatgcagaggcctctgaaaagactgatgaagaaatattaattaaaatgcaaatatgattagggatgaaaggggagggactaagaaactactcaacaggaatttgaggattgaggattcattgaagtagttacagaacatttgtaaaacggaacactgcgtccgtgagaaagactagaaatacatgaataatatgggataagctgtcagatgtgttagataaagaaagtatcatgtctaacagagttcagggcctgtttcaagtgaaaatggggcaaataaatgggatacatggtgtacatggtgtatgaaaattcttgtactgacctctttattcccacatactcacacatctacacgtgtggctgctggattaaaatgcacatacattgtatatctgatcaatatgaccaaactgccctcagacgagaaaacgttcttacaaaggcatagaatttccagaagaacacacacaatatcccagcgtcagttgtctctgaggtgtcaaactagggatctcgtaggtataaaaatcagactctttgattgcatatgttgtattatttcatatctaaactatcaaatgtgttatatttttaattaaaactggagctgcgttgacccgaggctgctgtgtgtagaatcatgtgttgtgctcttctctgctcccctggaagcctccgtcaacaggtcgagtttgcgactccacggagaaactgcactgatgtcaccaacttcgtgtcctgggctactcaccagcccatttcggactggactttgtgtccccccagattcacatgtcgaagccctaacccctaaatgagggcgtcaggagacagagacggggcctctggaagtgactagggtgagaggaggtgatgaagatggcatcctggtgatgggatcagtgcctgcaagaagaagccctctggagcgcacttcctctctccaccacgcaaggacacagccagaaggccaggccctcaccaggaaggatctggcaccttgctcgcacctgatcacagactcccagcctctggaattccgaggaaggaacctctgctgctgagaagccacccaggcatggctaagctgactcaaacaccgcagtgaatccaatggcttcagagtcattttacaggtgttgggagatttcatttcatagttgactcctttctaaggaagaaatggacttggcttacctgtcagagtttgacatgctggtgaattggaggttggaacgcatcctcctaccttgactttgtcggcgcagagcaggtgtgcactgtaatgggagctgcaggtggaaatggggagaggccaggcatggtggctcacgcttgtaatcccagcactacggggccaaggcgggaggatcacttgagtccagaaggccaagtctgcagtgagctatgattgcaccactgccttccagcctggatgacagtcaaaaaaaaagagagcgcatctagacttttagtgtctcaatcaaatttaaacaatggcaaatacattgtgcacaaaaaagctgcttttagatgctgtgttgagagagagagagatagagagagagacagaaaaggggaaagcctccaggccatggctactggtgttaatttgctgcaaaaagcagtgactgctgctgtgggctgaaggaggctgccccctaggcaggtgtgggccagggtctctcccagtgccgtcaggcttagggccatgattccaggagggagaaatctttgaaggcattggttgaattcagtagcatcaatggtcaacattcaattattttgttcatacaccacatatatgcttcaaactaaataaaaaataagactgataacaaattgaatgcctttgtcttgttcgggtattttaaagtccccaaaaaatcaaggcaaggtaaacatttgggattaaaaaataataataaattgaagctaaatccaatctttaattaaaagtgctcgtttggccgggtgcggtggctcacgcctgtaatcccagcagtttgggaggccgaggcgggcggatcacgaggtcaggagatcgagaccatcctggctaacacggtgaaaccccgtctctactaaaaatacaaaaaattagccaggcgagatggcgggcgcctgtagtcccagctacttgggaggctgaggcaggagaattgtgtgaacccgggaggcggagcttgcagtgggcccagatggcgccactgcactccagcctgggcgacagtgagactccgtctcaaaaaaaaaaaaaaaaaaaaaagtgcttgttttcaggctactctgcctctctctattgattggttctgttacttctgacaaaattgtccattgtaataagtgcagattcctgtaagcaagggatggcagattttcctgcttcaatccacagtcattctccagaaaaactggggaaagtcactgaatagactcacttacctcgggtatggaggtgggcagggaggtgtccacacacacctcaatgatttccaacaaggacttcaggcacactggctgggcgacagactcacatacggaagctgtgtgtggcctggtcctttgggaggagggcagcctgtttaaggatggggcacggtgagcttcatgaatctcaaactgctcttgtcctggtgatgttttgccttttaaaattacactgcactgagctcccgggacaactagggtattacagtggctgtcacttgctgggaggtggctggacagtggacagcggaggtctgtgtgatctcccctcccacaccgcacactctgcacctccagggacgagggcttgcagggccttgtgagagtccagcccttccatgtagaaaggaagggtgtcgtcgccgtcatgaacctcgtttatcaaaggagagcctcggttctacttcttttcaccaaagaggagaagaaaattcagctttggtagttttctccaggatcttgtgcggggggaggatagaatcagacaaatctgctagtggttaagctttgacactttctgggagttggtcagaggagggcttctatttcacagtcactttgtactgcagcagcctgtatgaagacaggatgtggatgtcagagacaggcgtctcacaagggtgcacttgtactgaacagcaggggaggaaagacgccttggagacagccggcagaagaggcctgactcagccctatgggggcccagcctgtggagcatgacaggaaggcagtgctgcaggatcacaggaagtgggcatgtgaagcctcccaactggaagtgggcttttgagggatcccaacaggaagtgagtgtgggaagcatcccaacaggaagtgggcgtgtggagccttcccaacaggaagtggacgtgggaagcctcccaacaggaagtgagtgtgtgaagcataccaacaggaagcgggcctgtgaagcctcccaacaggaagtaggcacgtgaagcctcccaacaggaggtgggtgtgtgaggcctcccaataggaagtgggcatgggaagcctcccaacaggaagtgggtgtgtgaagtcttcccaacaggaagtgagtgtgtgaagcatcccagtaggaagcgggcctgtgaagcctcccaacaggaagtaggcacgtgaagcctcccaacaggaggtgggtgtgtgaggcctcccaacaggaagtgggcatgtgaggcctcccaacaggaagtggcatgtgaggccttccaacaggaagtgggcgtgtgaagcctcccaacagcacctgcgacctggaggccatcagcacagggtcaccagccacatggaagtggatgaggaggagagggagaagaaaggatgttgaaaatgctcagtggcattacgggagcatttctgcagatgtgtttccagtctggagtttttagtgggatttcatgaggtaaaagggatgaggctgtcctatgaggtcaagatctatgtgaagcaccgacatatttaaggttgtccacaggcatggccggggtggggtggctcagagggccaggagggagcaccagtggtggaggtggaccagccatgccagatagaaatgtcctcaggtgaaataggaaggcatttatgttggatctcaggccatgggaactttcaaactttctaaatccagtcttcaaaacccattcaagctacatcaggtgtcttagggagctgtgcagaactgtaatcctccaggtaggcaatgacgggcatggaaagtgactgaagaaatgaggaggaaagatcagagggagcgatgaagtggggcaggaacctacccaaactgtgggtaggctttatgtagaggagagagcaaggtgggctacgcctggcctgggaggatgaagtgaggtaggaacctgccgaaattgtgggcagtctctgtgtagaggagagtgcgaggtgggatatgcctggcctaggaggatgaagtgaggtaggaacctgcccaaactgtgggcagtctctgtgtagacgagagggcggggtgggatatgcctggcctaggaggatgaagtgaggtaggaacctgcccaaactgtgggcagtctctgtgtagaggagagggcgaggtgggatatgcctggcctaggagtatgaagtgaggtaggaacctgcccaaactgtgggcagtctctgtgtagacgagagggcggggtgggatatgcctggcctaggaggatgaagtgaggtaggaacctgcccaaactgtgggcagtctctgtgtagaggagagggcgaggtgggatatgcctggcctaggaggatgaagtgagataggaacctgcccaaactgtgggcagtctctgtgtagaggagagggcgaggtgggatacacctgccctaggaggatgaagtaaggcaggaacctgctcaaattttggacagtctccatgtagaggggagggtgagatggggatatacctggcctaggaggatgaagtgaggtaggaacttgcccaaactgttggcaggctctgtgtagaggagagggcgggtgggctatacctggcctcggaggaggaggatacagcagaggagggttatgcattatgggaagacacagatgcaggtgcagtgaattctgacacacacagctttgcagcatctagacttttagtgtctcaatcagatttaaacaatggcaaatacattgtgcacaaaaagctgattttagatgctgtgttgaaacgtaggggattgtatgtgaggtgactgaaacagtttgtataatttgaaactccagcacagagctaagttccatccttttgaagtgatagccactaatttcctgagaactaaagcatcatttaaatatttaaattagtatttgtggtttgttttgccacagttaatccatgttttgccagtgactgaacacaggctgtttgtagtaacaaactgatttctccgagggtattattttctggtagattgcattcatagggatgcagagagcatccctgtgatgtgttgtggatgatacgggcagacccctgctcactcatgcacttgtttacgcagatagagtgtggggggtaggtggtctcggaggtgataaccactcttctttactccagctgaagcccacaaagttttccgtgtttcagaggtaactatgaactttgaattcttgggaaacaggagaggtagagagattttattttttaattctgtgtctggttcttttgtggtggtaaaagtagctatttttgtcatattgacaggtgcatctgctgagaaatgctggcgatgaagttaccatcaccgttgagtatctcagggaagcgccggcatttctgaagctcccgttaggtaagtgggaagaggagaaatgccagggtgctggagaaattcctttcttgccacattatttatccaaatgctaccacatggactgggatattaatcatttgctgagtgtacattcagagagaagaaaagtataggcaggcaccgtggcatcatgtagtcccatgacgttgtatgttttaacacatccacgggcttttttgaaggaagtgttatcagaccgtgcttctcgactgtgcttctcgtcacttaactacatgctcgttccttcatgcaaactcaccatgattgtatttatctatatgttaacgtagaagcaaagtttacacgtaaaatacctatgttgatctgagaaattttcagtgcaaaaaatgaaaataatggtacatttatgctatgaagtccctgacatattttggcacaaagcttgtaatcctctattatacttgaattgtgacccaatatgaaagtgatgaaccctaaatctagaaaaatgttttagtgaagatagttgttgtaacttttactaatgttattcagctgtcatggctttataaaggttggagtcaccaccgttcctttgatttagcagagggcatcactgccctctctttgtgggtaatcgggaaaggcctcgaaggcaaggcccaggctcccctgaagtcaacatctgctggtggctcaaaccccagggcatccgatgtggaatgaggacctcccgctgagccgacagtcgggttccttctcatgggggctggtgggctgtccttcctgtcactctctcatgggaaggaacagcttccctccctgggggttcatattgactgttttactttctctctctcttccattgatgtccctattgtcaatgccttccttctctcctgccccgagtggcccggctgtagctctcaggcacatcagtagttgagttctgatcatgcattgggtttttcactgatacaggaggggggcagggaagtgctgggaggagaagggcgggtccctggcgagggctgcacccccaggcctgtgcccatggacctaagtgaggacaggcactcctgttcttgcacccaaatgttgcgttttccagtaccaccctggcctaccacgcccccatcctatgcctataacaaccccaagaccctagtgggcagagacacaagtggccggatgtggagaagagcagaggagcggaagagtatgctgacaggcaccagcagacactggcaggctatcgactggcagaatgatgtggagtttggctggggtggttggacgagactccaggagaaaaccaccttgccactccatgccccttctggctctccatccatcttctgagagctaccaacactccataaaaccttgtgccaaccctccaagctcacgtgggatctgattcttctggtatgctaaggcaagaaccccgggatacagaaagccttctgtccttgcgataaggcagagggtctaattgagctgattaacataggccacccacagacagcagaactgaagcctacaagccacccacggatggcagaactgaaacctacaggccgcccacagatggcggaactgaagcctacaagccacccacagacgacagaactgaaaccaacaagccgcccacagacggcagaactgaagcctagaagccacccacagacggcagaactgaagcctataggccgcccacagacggcagaactgaagcctacaggccgcccacggatggcagaactgaaacctacaggccgcccacagacggcagaactgaagcctagaagccgcccacagacgtcagaactgaagcctacaagccgcccacagacggcagaactgaagcctagaagccgcccacagacggcagaactgaaacctacaggccgcccacagacggcagaactgaaacctacaggccgcccacagacggcagaactgaagcctagaagccgcccacagacggcagaactgaagcctacaagccgcccacagacggcagaactgaagcctagaagccgcccacagacggcagaactgaagcctagaagccgcccacagacggcagaactgaagcctagaagccgcccacagacggcagaactgaagcctagaagccgcccacagacggcagaactgaagcctacaggccgcccacagacggcagaactgaagcctacaggccgcccacagacgacagaactgaagcctacaggccgcccacagacggcagaactgaaacctacaggccgcccacagacggcagaactgaagcctagaagccgcccacagacggcagaactgaagcctacaagccgcccacagacggcagaactgaagcctacaggccgcccacagacggcagaactgaagcctagaagccgcccacagacggcagaactgaaacctacaggccgcccacagacggcagaactgaaacctacaggccgcccacagacggcagtactgaagcctacaggccgcccacagacggcagaactgaaacctacaagccgcccacagatggcagaactgaagcctagaagctgcccacagacggcagaactgaagcctacaggccgcccacagacggcagaactgaagcctacaggccgcccacagacggcagaactgaagcctagaagccgcccacagacggcagaactgaagcctacaggccgcccacagacggcagaactaacagagcgccctggaacacactcccactagggcttcaggagctggaaacatccacccctagatgctgccaggggtcagagccccaaagccggcccatctctatggcacccccgccagaggtttgagtagtggggcaccgaagaagcgagccactcccccatcacaagccctgcaaggggaacaagtgaacttttcctgtttcagcatttgatcaaaagcatcattagactcatagcatgacttctgctttcatcttcctgagcaaccaggaacaaatccatttcagcaactccatttttcccatcgatcacagcaggataactatgctattcacaatcttaggaaaatcgatcttcctgccattgtagcaaacctggatcagtaagattcactgcatgccttgccatcctcagagaccactccctctgctagaaggagccacgggagcatgaatgaagacctagagggttcttgaggaaaaagagtaaggggtgctgaggggctgtgcatgagaaaggcgaatattcccagggccgtagaggcagaacatgttagcaatggggcaaaggtttaagggagcgaaatgtcacacgcggcacagtggtgcacccctggggttttgagaaacgttgctgtgagttgggaagggggtggacttgagggctgcacagaagttcttggagccagcagggagactcaggtgtcagacgcacatcaggaggcccagcagtgagctcggatgggggaggaggactcacttgtgagggggcagcgtgagtgtctgcagattctgcagcagctgtgaccatacaggctcacgaaggaagaaactaagacttttcatagatttttgccagaaagaaaagaagagaagatagtggcttggacaggaggaggtggcattgataaaggaggagacagacagaaagcagggggtgctttcggatgttgctaagtgggggtgggaggcagaggacactcaccctggggccgttcctgacttctctctcaggcaaggtgacttcacaggccgagtgagatgggtgctgcgtctaagccagcttccctgggtgcctttgaaggagcagaatttaagcaacagcagcagcaacactgcaacaccagatggcagaggaagtgccccaggtggaggttttcaccgtgagcccctgcctagagccccatagcactgagcctgtgtttccctctgaggatgggcagctcttgcaattctagtgcctgagcctgtggggccggaggctgtctctgttgagattcacatcctgacttctgtccgtgggctccactaaaacctgcaggctccggggtccattgccagtcacatagtgacttcaatgagcgttgctgccggcatcctgagcggggctgtgctgactctgatggctctgcctggacaggcccagctacacggaccaccccacacgtcctcgggcacatgcaggaaagggcagcctggggtgcagatcacagaggccaggggtgctgagtccccattaattcaataagtgtctattctccttttatttcattctttacagtgaaaaatgttaaaatcttagtatccataacaatttaagcaagacagccataatctctctataaattcaggcgaaacgtcctctgctgaattcacaccgtgaaggtaaaattgctgtgcctgagcagacttcactttctgactgcatgaagcagaaatccaccgagcagctccagtgagtggggaaagagagtatcacggcagatctgtgcggaaaatgtccagtttccacattttaaaacgtttatcaaagagaaaataaacaaccgtttgagactgagtcaaagtagggttttatttttcacaagtcaggctcttggtctttttataaagatacaattcatgcaacagaaaattcaccgttttaaagtaacacttcagcagttttaaatatttcactacgttgtagaggcattgctactgtctaattccaaaacatttccctcatcccaaaaataaaccctgtgccagttagtcagcccggactctccccaccccagccctcggcagccgggaatttccttcctgtctctttgtgggtaatcaggaagggccttgaaggccaggcccaggctcccctgaagtcaacatctgctggtggctcaaaccccgtggcatccgacctggaatgaggatctccgtctgcgccggacgttttctgtaatggaatcccgcacaaagatgcctttgtgtctggcatcttcccccagtgtagtttcagagtccgcccccaatgtcgcgggcatcggtgctgcattctcttagctgaacagcatccgtcctagggaatatatctgtgtatacggacccatgtacataccctttgtatgggttttgtttatccattcatcagctgatgggcatttgtcttgcttctgtttgggggatattgtgaattataccaccatgagcatccgtgaatgcgtttttcttgggagatgttttccttcccaccgagtggatgccgactactggaattgctgggtcctctggtgactctaggctcaactttttgagtggctgccaaattattttccacagcagccgcaccattttacattccaaccagcattgcctgagggtaatctaagcagttttgataggttagggttaattttttttaagattaggtgttttaataaacattgatcatatactacatgttttctaatatgattgtttatttttgacacctaataaaaataaactaagtctatttttctcattaagaattcttgatattgggttttaaaaaataatggacttttatttgtgatagaagaaagatataactattcacatttctgttctgggatatggatgacaagatacctattcatcagaaataaatttatagaaatttagagtggaagcgtgactgtcaaatgtaaatttattgactatttacctgttagctcattcagtcaatggtggcttggatctgctgccattagtcatgtgtctcctttgtctatagcatgaactttgggattttggaagactgcagtcattaaaaatattttgattttcctctccaattactgataaggtgattacgggtataaaataacaggcattgggaaagaatttcaaatagataacagtgaaatgtgcttctgaacgctaaagggcagattcaggtgctgtctcaacaaccctgtgaaacgctctgggtgctgtgtggagcagtggctggtccacagcagagtcttcaccagacagtaaacagtggtcaatgaaaaagaaaagttcttcatctagtaaaattgacaactaccctttaaaagttaagcaattcttatttcccccagagttctccaagtttctcaatatcttaattttcacaaaggaatatggtatgaagtgttttctaaaaatatgagtctttgtagatattatacagctggacaaagggtaacagcgagccatggtaactcgctgaacgttgcacatcacatttgcagaggcagattggaggttagagggtcttgagcctccaagccatatcgcattcctgtctgcaccaagcgaggctggtggtcacattatgactttgcatatgtggtgccgattgttcttcactttaatcccaggaaatagacggcacaacagggcatcccaaatacaaatgcatggagttgtgtccaccaggctttcttcagcttcacaggggtctttcctgcaagaagccagtgtgcaagttcaagcctccattctgcaacagcaccatgtggttgtgatgattgatggctggctggtgacaggtcctcctgctagtgctgttctcagtgcttctttcctctttccaggcactcaggtgatctaacaacagggcctgctctccactcagggatgcatcaaaggctcctttctcagtgttgggaggtctctgttccacctggctgggaatctggcatagtcaggctgctgtgttcacagatctgtctttacgtggcaataccacaaaaatgctgggctaaaacactaagccacatgggagctgcccactcttatagtccagcctgaagatattggtgggaagggacaataaaggaacaaatacagcctttctccctgagctgttcccaggaccttggaaacggcatgaaagtgctctatgtcccctgggtaatccatggagcatgaagatctatgaactggcttgtttctgtttagcaggtgtaagctctggttgcatgagcctgtatttccagggaaattattttatgagcacctgttttacctgtaatgtgctaagtgctttgagtgtgagcttttcaatattgtctctggaaaaaaccttttgagtggcctggtatgatcatctcctttcaaaagagaacactgcaatcacagaaggcgccttgtgctgaccattccagggggtcatgttgacagggagggcctgagctgctgggggcacaccttcctgatgctgtccctccaccctggggagccctcacaggagccggcagtggtccctcccttcaacctgaggtcagatcttggtgaggagaccatatcacagcaggaaagtgagaggccattggggatgacccagcccataactggacaccaggcattttggtgctggtaacttcccatgcacaggtagaactgaagtcactgcatggtcacagtgtgctttgtcagtggcaccaattggaagggacttctcttgttttgctgcagggtccccagggccatccagcgaccacagcagtggggcctcctctcccctctttgacagcggtttgcatctgaacggaaactccagtaccacagtaagcatatagatttttgttaaattttattttaacagaaatatcagtagcccagagataatctctagacagaattaaaaagatgctgtactgcccagtgaagataattgtgttagtttcagaggaaatacttagaacacagattgaaggtgctgttctgttgacatttactcccacgtgggacacatcctgattgcattataggatattttaagttcataattcacagcatctcagtgagcaggcaagaattctttgagtcctgcctctgacttacatatcaccgtgactgtaggaaggactgcaggttatttttaggaaacttctgtgagactcccatgaatttcttaacagaaaacacctaaggaggtatgaacactgtataatgcagtgagttttaatcacattctaaatatccaccctcccaagaaaaccagacttgagcaaaaaggagaacctgcagctccctgggacatggggctcccgccctcctccctcagaagcctgggctctgagagaacctgtagctccctggggcatggggctcacactctccttcctcagaagcctgggctctgagagaacctgcagctccctgggacacagggctcacgccctcctctctcagaagcctgggctccaactcccgcagggtgacctgtgagctgcgccccttggggaattcatcatccacagaggcattagtgcacgagaaatgtagaatcctgtaagcagtttgaaaaaatgttttattataaatcattccagtcaaatcatcaaaatgactggatacttcatacacagggagaacctagagaaaaatattcatgtttgtacaatctatgtttaagatgtctgactactccatttctaaccatttaattgagctcctgaaattaaaaattgcatttagactctgtgtcagttatgaagcaaaataataaaacaaatgcccatgaaattgcagttctaagcaataattagaatattgtccctagctttccatctgtgcagtcttccatactccattttctggcctgcccagagatataaggcatcctgaattttgtgtttgtcattttcttgattgaaaaaaagttttatccatatatatatatatatatatgtaaaatttcattttattgcaaggcttataaaatattattcttccatagtcttctgagatttgcatgtttacttactgtttgtttctgtgaggttttttgctgtatgatatttcactacagtttatccattgtcagttgcctgtggacactttgcctttgttttatgtttgtttttctagtttatcatcattaaaagaggtgcagccataaagatacttataaatgtctcttggctattccataaggtagaatttctgagtgctagattataccaggatgttctattttcaaaataacagcaagttttctacaaaagtggctgtgcagtttatattcacacagctctgggaaattccagttgagccacagcctctccagtgctaggtaatttttgacttaatatttgaagtacagtagctgtaaaatggttctctctctggggctctatttcatttccatcattactaatgagttttgtttactgtttctatttgtattttcctttggtttttcctcttctgtgaaatgctgtttatctctttggcacatttactgttaaggtgatcttttttcttacaaatccattgaaatgtttaatatacacttggtaataatattttggtggtaatgggttaaaaatctcttcctacagcttataacttggctttttcattttgtttgtgctatcttctgtggttttgtggttttaggattttgttcaagaaatctttcttatcttaagttcataaagacacttccttatattttcctctaaatattgttaacgtttgcttttcacattagatctctaaatcccatgagatctgcttttattaaagctgtgaaaggtagagttccaggtgcatttttatgggtaaccagttgtctcaacactatttctgggtaatctgcactgccacggctcacaagtaaccagcaccatgagcgcaggcgtgtgctgctgagacctctgttgtattctattggtcaatatcaatggcaatatcacactatgtaattactaggtatttataatcaatttgtgtcatctgtaggccttgccctcttgccacctcctaactcactctattttttccatcctctctctttgttttttcttgtgaatttcaatagctcttgatccagttctacaaaaaacagtgttgggattttgactgtaattgccagatttactggggagaatcaaacctttctgactcacctttcctgcttatggaaagcatatttatttgtgctatctttgaattaatgctgctccatttctttccatattatttaatattttcctacagagtctttttaaaattaattttacaagaggattgtacaattccatttgtctgcaacaccctgtcccccaagccagcacagttcagcagggagaaactgtcctcctaccctttctgtgcagttatcctcagggtttttctcccattgtgtggctgtagcttgttgagtggactctaaactcttcctggaaggagacacagagcatggggcatgattcggtgccatttcaggaaaggtcagacagtctttgtggctctggtaagtgcagtggaaaagtaacacgacagtatcgttgaagggaggctgcctggttctcctggttctcccagttctcctggttctcccagctctcctggttcttcaggctttggtggatgtgatcctcatgtcaaggagtaattgtggaattatggaggggacatgggtagagtgactagcctaatgcttggaatatgtcatcttcagacatcctcatcctccttatcagcaagagaaagagaaaaagaagtgctaaccttaaaattctttgtagttattcatatggttagctcagctccagaataaagcatcatcaggttatttaaactcattacagggaatctgaattgcagagtttaaaaatagctttaatatgttcgttttagaaggctatcaagactcaatattgagacctacctgagggtgaagggtgggaggagggagaggatcagaaaaaataactattgagtattaggattaatacctgggtaaagaaataacctgtataacaagcccccataacacaagtttacctatataacaaacctgcacatgtacccctgaacctaaaataaagtttgtttttattttaaataaaaacttaaacaaaagttgacaaatgggatctaattaaagagcttctgcacagcaaaaacaactatcatcagagtgaacaggcaagttacaaagtgggagacaatttttgcaatctatctgtctgacaaaggtctaatatccagaatctacaaggaactaaaacaaatttacaagaaaaaaaaaaacattaaatgtgggcaaaggacacgaacagatacttctcaaaagaagacattcatgtggccaacaagcagatgaagaaaggctcatcatcactgatccccagagaaatgcaaatcaaaaccacaatgagataccatctcaggccagtcagaatggtgatcattaaaaagtcagatgatgtcgaggttgcagagaaataggaacactttttcactgttggtgggaatgtaaattcattcaaccattgtggaagacggtgtggtgattcctcaaaggtctagaaccagaaataccatttgacttagcaatcctattactgggtatatacccaaaggaatgcaaattattctattacaataatacatgcatgtgtatattaattgcagcactattcacaattgtaaacacatagatcaacccaaatgcccatcaatgatagacttgataaaggaaatgtggtagagatacaccatggaatactatgcagccataaaaaggagcaagactatgtcctttgcagggacatggatgaagctggaagccattatcctcagcaaaataaggcaggaacagaaaagcaaacaccacatattctcacttataagtgggaactgaactatgagaacacatggaggggaacagcacacactggggcccggcaaggggtgggggccatggtgggagggagagcatcaagaaaaaatagctaatggatgctgggcttaatacctaggtgatgggttgataggtgcagcaaaccaccatggcacacgtttaccaatgtaacaaacctgcacatcctgcagatgtactctggaacttaaaaataaaaattaaaaaaaaaaaactttaaaaggaaccagaagttaaaaagaaaatgatagtaaaattgacaacttctttctcaacaaaaacaagagaagctagaggaaatgaaatgacacctttgaagtatgaaaaagaaattaattcctgtttaaaattctataatacccagcaaacgtgcttcaaaagaaaaaaataatatattttctgacaaaaaagagataattatttccagtagaccagcactttaaatttattttttttgaaaaggaaactaagcatacccacatagcccttaaagttgacatgcacttcttgaggtgataaaaggttattggcacactgctgaatgaaaacaacatttaaataatttcttttatattaatttgtcataaaagattagcagtgattgcatctgttgttaaatatgagataatttttatattagccagactactgtattgttggaatttgggacaataaacacttatcattttgttgttgttctttaaaatatttttaattatatgataaacacttctggcatgatatcaagggaaaaatacatagatgaaaattttttaaaagactcaaaatcctgtaagaattttgaggcatgctagttggttttctggatggtactttaatcatgtaaaagccaatttgctgtgcagtgagttgaccattgggctctctcttgtagagacgatttaaagcattgtgacaatggggttttctagatatacaatcctgtcatcttcaaacagggacaatttgacttcctcttttcctaattgaataccctttatttccttctcctgcctgattgccctggccagaacttccaacactatgttgaataggagtggtgagagaggacatctctgtcttgtgccagttttcaaagggaatgcttccagtttttgcccattcagtatgatattggctgtgggtttgtcatagatagctcttattattttgagatatgtcccatcaatacctaatttattgagagtttttagcatgaagggttgttgaattttgtcaaaggccttttctgcatctattgagataatcatgtggtttttgtcattggttatatttatgtgatggattatgttcattgatttgcgtatgttgaaccaggcttgcatcccagggatgaagcccacttgatcatggtggataagctttttgatgtgctgctggattcagtttgccagtattttattgaggatttttgcatcaatgttcatcaaggatattggtctaaaattctctttttttgttgtgtctctgccaggctttggtatcaggatgatgctggcctcataaaatgagttagggaggattccctctttttgtattgactggaatagtttcagaaggaatggtaccagctcctccttgtacctctggtagaattcagctttgaatccatctggtcctggactctttttggttggtaagctattgattattgccacaatttcagatcctgttattggtctattcagagattcaacttcttcctggtttagtcttgggagggtgtatgtgtcgaggaatttatccatttcttctagattttctagtttatttgcatagaggtgtttgtagtattctttgatggtagtttgcatttctgtgggatcggtggtgatatcccttttatcattttttattgcatctatttgattcttctctcttttcttctttattagtcttgctagcggtctatcaattttgttgatcctttcaaaaaaccagctcctggattaattaattttttgaagggttttttgtgtctctatttccttcagttctgctctgattttagttagcccaaaatctccttaagctgataagcaacttcagcaaagtctcaggatacaaaatcaatgtgcaaaaatcacaagcattcttatacaccaataacagacaaacagggagccaaatcatgagtgaactcccattcacaattgcttcaaagagaataaaatacctaggaatccaacttacaagggatgtgaaggacctcttcaaggagaactacaaaccactactcaatgaaataaaagaggatacaaacaaatggaagaacattccatgctcatgggtaggaagaatcaatatcgtgaaaatgaccatactgcccaaggtaatttatagattcagtgccatccccatgaagctaccaatgactttcttcacagaattggaaaaaactactttaaagttcatatggaaccaaaaaagagcctgcatcgccaagtcagtcctaagccaaaagaacaaagctggaggcatcacgctacctgacttcaaactatactacaaggctacagtaaccaaaacagcatggtactggtaccaaaacagagatatagatcaatggaacagaacagagccctcagaaataatgccgtgtatctacaactatctgatctttgacaaacctgagaaaaacaagcaatggggaaaggattccctatttaataaatggtgctgggaaaactggctagccatatgtagaaagctgaaactggatcccttccttacaccttatacaaaaattaattcaagatggattaaagacttaaacattagacctaaaaccataaaaaccctagaagaaaacctaggcattaccattcaggacataggcatgggcaaggacttcatgtctaaaacaccaaaagcaatggcaacaaaagccaaaattgacaaatgggatctaattaaactaaagagcttctgcacagcaaaagaaactaccatcagagtgaacaggcaacctacagaatgggagaaaatttttgcaacctactcatctgacaaaaggctaatatccagaatctacaatgaactcaaacaaatttacaagaaaaaaacaaacaaccccatcaaaaagtgggcaaaggacatgaacagacacttctcaaaagaagacatttatgcagccaaaaaacacatgaaaaaatgctcatcatcactggccatcagagaaatgcaaatcaaaaccacattgagataccatctcacaccagttagaatggcaaacattgaaaagtcaggaaacaacaggttctggagaggatgtggagaaataggaacacttttacactgttgatgggactgtaaactagttcaaccattgtggaagtcagtgtggcgattcctcagggatctagaactagaaataccatttgacccagccatcccattactgggtatatacccaaaggattataaatcatgctgctataaagacacatgcacacgtatgtttattgtggcactattcacaatagcgaagacttggaaccaacccaaatgtccaacaatgatagactggattaagaaaatgtggcacatatgcaccatggaatactatgcagccataaaaaatgatgagttcatgtcctttatagggacatggatgaaattggaaatcatcattctcagcaaaccatcgcaaggacaaaaagcaaacaccacatattctcactcataggtgggaattgaacaatgagaacacatggacacaggaaggggaacatcaaactctggggactgtagtggggtgggggaaggggagagggatagcattaggagatatacctaatgctaaatgacaagttaatgggtgcagcacaccaacatggcacatgtatacatatgtaactaacctgcacattgtgcacatgtaccctaaaacttaaagtataataataataaaataaataaagcattgtggttattctttgcactcaagagtgtgttttatggtacctagcaaagtggtaatactagcattgatagtgtctatggactggagaataaaacagatggtgcaatttctttcttgaaagaggtgagttggaaactttctagactcaaaggatttaagttgctttgttggctgcattttcagactcaccagcttcactttcatcctcccagggccaggcctgatggagcaaaaagcaaagtttgtcatgttcagagcaaccttgtaatcacaagaaacccagaggaatggtttctgtctttacaagtggatacctctgacccctgctgcattagcaacctcttcctctagaggtagggtaggtggtgtgtaatgttttctctctgtcctgacagctggagtaattacctgagctaccttatatatttgacagtttttccgtgttattatttgaagctaaattactaactactgctttcctagaagtcacatttctcatttctttttcttctgcctcctaaaagctgaagcttgcagggagcttttgtttctagttgccacatatcctttcccagcacctgagtatggttcacgtagtttaagattctaagttcattatttatactatgccatttttgtctcaagaatccttactaaacatttataatgaaggaaaaatcccactcacattaatatcatgcgtttaggtttggaagtacagaatccattgatctttcacctgttgctgaatccattgctgcttcttcccatcttctgcaaattctgtcctgactggcttgttaattggttagtgtgcagctttccttcaaagggtgcatagagggctgcctccctgattgtgcgcatgtgcaaaaatgcttttcctcgccttgggagatggtgccttcactcagtgttctgggttcttggattgctgacctgatcctttgagaagatttaaagtgctcacctgtggcttctgctttagctctgcccctgcaagtctaatgtgggactcactagttttcctttgtaagaaacctttaccaaaaatgaataaggagttataaagaacaaaatatttctgatagtaaatccctgcttttctaacttaaaaatttcaaaaaaaaaaaaaaaaaaactaatcaaaaagactctggtcattgtaactaactgaatgaatcaagaagggtataggaaaaaagtctcaaaacaaaaattacaaaaggcgtaatagaacagatgagaaacttgtaaataatagtcacacaaaagaaaaggcagctataataataaaaataaataaataaagtattgagtctgcaatccgagaggaaagattgcctcccaggcagagatagcaaatgaccttgcacatttaattgatgtacaaggtgcctgcagtgaagtaggtgactctgaagtgaaaacttaaactttacagcatctttgtcgaggatagcatgtctctagaatctggaagtattccccccaaaaataatcagtttttttgtttgtttgtttgcttgtttgagacagggtctcccactgtttcccaggctagagtgcagtgatgggatctgggctcactgcagcctcaacttcctggactcaagtgatcctcccaactcagccttcccagtagctggggctataggtgtgcgctaccatgcctagataatttttgtatcctttttgtaaagatggagtttcaccatgttgcccaggctggtcttgaactcctgggctcaagcaatcctccctcctcagccccctaaaatgctggaattacaggcatgagccatggcacctgacctaatctctattttgacctctataaccatagattcgttttgcctgtttttgaatttcacatgaatgagagtcatattcttgtgtctgactttgtttgctcaatattatgacattatatgcagcagtagacttttttatttttccttgctatccagtattccactgtatgctcataacacaatgttgctatctaatctaatgatgtgggcattggagttttctgattggggcctattacatataaaaccattatgattcatttgtgcacatgtcttttaggggatgtagtatccatttcttctgggtgtctgctcaggagtgcagtttcagggtgatatgatacgtgtatgtccttacctttagcagatcctactcggcagtttttcaaacaggttgtatcaactgaccaccagcagggtgaggtgtgagaattccagtttcacattcttgcatcatttcatgtcatatgccttcaccagtaaggctggacagatagagaatagtatttctttagcatcatcaacacgatggcaaaacagcaagttcaaaaaattgatgggaattagcaactttgtgattcagtctggacattttatttttattatatatatgtgtgtgtgtgtacacatataaaacaacttaaaatattttcaaaagctatttatacactctcagttcatgaagtttttctttttcaaaaaactcagatgcaaaaggcatttattcttgctgaaggaaaaattaaggaaacctagaatatatagttattcaaaagaggaaagaagtaagcattaaaaaaagagtttttccatgtatatccaatttttttttctcaaacaaatataaggaaaggtgctttctacttctggtagtgttttagaatatctgttaggaagggctgtcaaaaccctatttcctacaaaaaatataaaatagttattgcttggcttgtagaatttcagcgagttgaatggagatgaactgaatgtggagtgttgagttacaagcactcaaggattgtgggggccacccttggtcctaatacttctatgggcccccagtccatcaggagactaagccaaggtcagcagtagaaagaaggggtcagaattggagaattgtacattaatccaggagttcaggaacatggctaagttgatcccagctcacagcacaagtaactgaaaacacatttaatttaggccccaagttatccgtaatttaagttcaaccaaatatgggaacatcaacacattttatcaaacacataagggaaaatactacatagatgagtgagcaaaaaataaaaacaatagactcaggcaactaaaacgtatagattttcagacattgaatataaaaaaactatgatgactatcttagccctttctcacactgctataaagaagtaccagaaactgggaaattcataaagaaaagaggtttaattggctcatatttccataggctgtacaggaagcatggctggggaggcctcaggaaacttacaatcatggtagaaagtgaagaggaagcaggtgtgccttcacatggccagagcaggaggaagagcaagaagcaggaggtgctacacagttttaaacaaccagatcttatgagaactcactcactattataagaatagcaagagaaaatctgcccccacgattcaatcacctcccatcaggcccttcttctgacattggggattacaattcaacatgagatttgggcagagacacaaatccaaaacatatcattccacctttgacccctgccaaatctcatgtccttctcacattgcagaatacaatcattcctcctcaacagtcccccaagttttaactcatgtcagcattaactcaaaagtccatagttcaaagtctcatctaagacaaagcaagtcccttccacctataagcctgtaaaataattttaaaaagttagttacttccaagatacaatgggtatacaggcattgggtaaatacacccattccaaatgggagaattcagctcaaacaaaagggctgcaggccccatgcaagtctgaaacccaaaagggcagtcagtaaatcttaaagctccaaaataatctcttttgactccatgtctcacatccaggccactctgatgcaaggggtgggctcttaaggccttgggcagccccactgctgtggctctcaaaggctcagctcctattactgctctcaaagactggcgttgagtgcctgtgggtcttccaggaacatggtgcaaactgtcagtagatctatcattctggggtctggaggatggtagccttcttctcacagttccagtagtcagcatcccagtagagactctgtgtgggagctccaaccgcacatttcccctctgcactgccctagtagaggttctccatgaaggcttctcccctgcagcagacttctgcctggacatccaggaatttccatacatcctctgaaatctaggcggaggctcccaaaccttgactcttgccctctgggcacctgcaggcttaacaccacatggaagtcaccaaggattacaacttgcactccctggagcagaggcctgagacatatctgggacccttataccatggtgggagctggagtggctgggaggcagggagcagtgtcccaagattgcacagggcagcagggccccgggcctggcccaggaaatcattcttccctccaagacctctaggtctgtgatgggatggactgctaagaaggtccctgaaatgtcttcaaggcattttccttgttgtttgggctattaacatttggctcctctttacttatgtaaatttctgcaactggctggaattccttccctgaaaatggatttttcttttctaccacatggataggctgcaaattttccaaactttaacactctgctttccttctatataagttctacttttacatcatttttttgcaaacaaatatgagcacaggttgctagaagcagccaggccccatcttgaatgctttgctgctcagaaatttcttccaccagataccccatatcataactctcaagttcaatgttgcacagatccctagagcaggggcacaatgcctccaacctctttgctataagtgtaacaaaagtgatgacctttgctactgtttctaataagtccctcatttccatctgagaccacctcagcctggacttcattcactatcagcattttggtcacaacttagcaagtctctaggaagtttcaaacattcacttattttcctattttctgctgagccctccaaactgttctgatctctgccattacccagttccaaagtcactttcacattttcaggtatctttatagcaataccttagcagtattcgtggtaccaattttctgtattagtctgttctcatattgctgtaaagaaatacctgaaactgggtaatttatcaagaaaaggggtttaattggctcatagtaccacagggtatacaggaagcatggctagggagacctcagaaaacttaaacaatcatgttggaagccaaaggggaagcaggcaggtcttacgtagctagagtgggaggaagagcaagaagggggaggtgctacacacttttaataaaccagatctcatgaaatctcactgtcatgagaacagcaaggggaaatctgccctcatgatctgatcacctctcaccaagttctcttccaacattgaggattacaattcaacatgagattttagtggagacacaaatccaaaccatattaatcacatatattaaacattaaagaaataagcaagagactcacatgactgcaaaaattataaatcaagtgactctactagatattataaatatttaaacagaaacatcagttcactgttaagcaggactttagagctggagaggttttgtgagtggaagacaaatgtgaggtggcagctacaaattcagcacagggaatgcagaggggctgcagagacagaccgaagacgtctagcacatgctcacccatcaaggtgtctgaaccatgtgctacttgaaaggatggaggagaggcaacatttgaatacataattaatgataattttctggagataaaaatttacagcatatgaatttacaaattcagaaagaacaatgtatccaaggtaggataattgcattggttaattttatgtgtccacttggctaggacgtggtacccagataggtggtcaaacatgattctagatttttctgtgaaggtttttagatgagattaacagatcagtgctttcggtaaagcacatggacctccctaatctgggtgggcctcgtccaatcagttgaaggccttaaaacaaaagggtgacctcaccaagcaagaagggattctgccagctgctgctctttgggcttaaactgcagccacttcctggggctccagcctgctggcccatcccttcagattttggatttctcaagcctccacaatcacataaagcagtcccttaaaataaatttatctctctacacacacaaacacacacacccctcattggttctgtttctcagaagaaccctgactaatatagtagttaaaggcaatccaattctaggcaaactattgtgaaactacggagcaccaagaagcaacaggcaatcttaaaatcagctagggcaagcagagatcatttccaaagaatggcaatttagttgacagcagatttctcaacaacagtggaaaccagaaaatagtgcagtattattttcaaaattatgtaggaaagaaaaataactgttgagctatctttatgatcctcataaaactatctttccagaacaaagtaaaaataaagacttgttcgcacaaagagagtctgaaagagcattttaccaacagactttcgctagtagaatttctgaaggacacacttcaggaagataaataaacatgattctagaagggcggctggagagtagagggcatgtaaatgcagatggctctaacaagcgttagctttataaactaatgcaccactgttgactgtgtccagtgtcttaggttaagaaaaaacagacacagcgtgctgaaaacaatagcttacaattcagaatgaggtgagtggatgtaaagtacattctgaagtgctcatattgttaagatacttcacgaattataataggtatgcctagtaaaacatcagagatacatagttgaccagtaaagataaataaaatgaaaaagaagaaattacaaaaaacctgaaaatagaaaataaagaaatacagaaaaagaagaaaatgagagaaccaaagataagaaggtagagttgaatataaatacagcagaaattaaataaatgtaaatagataaatttgctaggtaagagtcagaggcctattagataaaataataacaaacaagaaaattcagcttttgctatttaaaagagacacactcaaaataaattttcatacattttactgaaagaaaattgaaggaattcaatatatatacaataataatgagcaataccagaaaacacatgttaagacaaagtgcattgttaaacatagaaaggataattttcaatttgcctgaaatacatgaaaaatgtcaacttaaatagctacaaaatacataaatttttaaagttaatacagtgaaaacttaatctactgtctccttttggggtatcagtcatctctctcaaatattgaaaagtcacacaaaatcttaatagtaacgggatgggtttgaactgtaatattaacaaagttgaacacatgggcatagtagtttatcaatccaatggcaaatcttaataaatatatttttaatggtgaatctttaaatgaattcccattaaaatcaaaaataagacaaagatacctacgttatttattgtgaaagaaatattgaaatggaggttctgataagcacactatgacaagaaaaaacaacaaaacatgattattgtcaaagaagaaatgggactgttatttctagatgacctaaaaatgcagccaaatacactatgtaatgtggatataatgagagatcaacaatgtgacagcatataagataacataaaaagtcaactacaattatattcaaaaatagaaagcgtaataaaaatatgttaaaatataaataaagtataaggtagcaaatctttgtaagacctttataaaaatatgaaatggaaagaaataccatatcaatggatagaaaaacctcaatatcctaaatatgaagagtcttccaagtgcatgtatacattccaagaagtgtcaatatatatcgtatgaggataattttgtagaaattaacaagacagttctcaacatatttgtaagagcaaagtcccagcatagtcaaggtattattgaagcaggagttgggggtcttgttcttcttgttcttccagaccttttatttgaagatactgcaattaagacagcattcaggatcacgtgaaatgaccaactgaaacacaatagaggaaatataatgggactctaacttttttttttttgagatggagtctcgctctgttgcccaggctggagtccagtggcacaatcttgactcactgcaacctctgcctcccgggttcaagtgattctcctgcctcagcctcccaagtaggtgcacgccagcacgcccagctaatttttttgtatttttagtagagacggggtttcaccatgttggccagaatggtctcaatctcttgacctcgtgatccacccactttggcctcccaaagtgctgggattacaggcgtgagccaccgtgcccggccgggactctatcttatatggaatacttcatataacagagggtgtcttagagaacacttggaaaaataaggaagcttagaataaaaaatacatttcacatggtttaacaattaatatatgaagccaaatctttaaaacctttgggaagaaaatcagaataattttatgatctcgggaaagggaaagactgttcatcttaaaaagtgaacataaaaaatttaagttcatcttaattaaattaaaaagctttctgttaaacacgatagtaatgtggaaagaccaaccgaatttggggaaaatattatatatacacacagtcatcccttggtttccacaggggattggttctaggacacactgtagataacaaaatccatagatgcttaagacccttatataaaatggtataattatttgtgtataacttgcccacgttctcccatatacttttaatcatctgtagattacttataatacctaatacagtgtaaatgctgtgtaaatagttcctactctctatttttctattctatatatttctatttctctatttttcatttggatcattttgtataactttttgtgggaggtattttcaatgcatggttgattgaatccacagatgtggaaccacaaatatggagggctgactatatatatatatatatatatatatatatatatatatatatatatgacatatataaacatatgtataaatgcatgtgactgtaaatgtatatatataatacttaaccatatatatatttggaatataagaatatttacaattacaataaaggacagcaaaatagaaacatacacaaaatatataattgaatatttccagaaaaggaagcaagaataataaatgatctggcacgttaagagattttcaaactcatcaattgtaagagaaaagcaaatatctttagaagtcaattttctgtaagatatcatatatctaaatgctgccacgatgtgtattgatgtgtattgatgggaatactcattcatagaggaagcagatataaattagtgcaaccactttgaaaaacaatttagtactatcatttacaactgaatgtttaaaaacatcaatatgcagaaattgcacttatggatacaaacaccagagctgaatttacatgctccttcagagacatgcagcaaaattcactgaagctagaatcaggaggcaatcccacatgctcattaagattaaaatggaagcaaagaacaagaaagaaaatgagggcttcagggccccttaattgcattgggccctaggaggaacactagtgatgtcttcccatgacttttacatttgtaaaatttgcaatttctcccttatcatatctcttttcatatcagatgatgttggggtgcctgtaggcattcctctatccagctgggtagacgaagttttactaggaatagatttagtggcaaattgaagtgcatttgaattgctctcatgtagactttacatttgtattatttttcttaaagcagtcccccagattttatcatcattgtgcttatcaaaaacgggagccaccacagaattcaggatattggttttggaggagacaaggccaactgtggccgtgggatcagaaagcagggcccagagagctgtaatgggattagaaatgttctaatttgtggctgggcgtggtggctcacacctgtaatcccagcactttgggaggctgaggtgaacggatcatgaggtcaggagattgagtccatcctggctaacacggtgaaaccccatctctagtaaaaatacaaaaaattagccaggtgtggtggcgctcgcctgtagtcccagctacttgggaggctgaggcaggagaatcactggaacccaggaggcagaggttgcagtgagccgacatcgtgccactgcactccagcctggcgacagagcgagactctgtctcaaaataaaaagttctaatttgttagtccagtggtagctttattgttttcattttaattttatgctttataactttatatattatatatgtacataagtatgtatgtatatatgttatttatgtatatataaaatacaaatatttaaaatgtagctgatagaaaagttgatagacatttaagtaaataacttaggatcttcaaattggaaaggggttgcttggcagaagacagtaaattgtttccttccctatatattaacatatttttagataaaaatgaagtagttgtatataaacagcagctctgttaagaaccacgcatgggctctgagaagatagaaggactgggcccagaaggcattgcaatcccaggagtcagagccagatgatgtggggcagagggagttgggaacgtggtttccacaaaaggttctgtttcacggctgtgttttctgtttaggtgatttagaaaggtctgagtgcaggaagcagtgtttctggagagtgctctgcagcgggtgccaagatcattagggacccttgtgtcttcaccatagactccacacccagggatttattacaaggggtgttccctagccagtgctgtgcgataagagaagtagatttaatctaacttctcaagaataggaaaataactatgtggtgacacagtcgtgtgatgaaatttgtcagtattttcaagtggaatttaccaagaatttttaattcttggtaaattaattttttaattttagaaaacacatgatgttttctagaattaaagcaaggctccatctcaaataataataataatcatcatcatctggttggaacaatgtgagacgggcttccttcacgcaggaaatttcgagcttgcgttaatcagttgtgttgctccaagggaaaacatactaaggtgacttctcggactcatctgatcacaccgtccctcctacaccctcccctagtggaatagaccagcaaaaattgcatttcatggagcagaatttgggcaccctgttctagaggttttgtgatgataaaatgtgtacgttcactgtcagatttatggcagataaaggaatgtttccacacaatttgtcctgttaatcagaaggtgccctgtcctctgtgagtagtgggtggaagagagcagtcagacacctgcaggtcagcctctgtgttcagctagtccatgtgaaaggctcacagaggccatgctggagacccctctatgaggggctcagggaggagggggctgctgaggatgcccgcggcatggcagagaggcagggcaggggctgtggccccattacatagtctgcagcaggccccccaaattcctcattgttgtaatagcttcaccccaaattcagaactctttgttctgtttcaaagttgctccttaaaataggtggctctgaaacgggaatgggtgactcctgccgagccgtggggaactcccagaacctcctgagttttctcaggtggcaggtggacaactggggaggctctcggcacaatttgggaaagccctccctcctagaggctccgcaggcagccgctcaccacctgatgaaaaggattggaaagcgtagcccaggcttcatcactgatacccgaggacctgcctgcttttgtttgattgttcccttgtctatttatttttctgagatactaaatgagcaacgcatattttagaagtccgttgctgtactgaaaagtaaatcatttaaaacactcattgctagtggccacagtgatgcacctgccacaggattgcagaatatatctcccctgaataaagaagaaaaaaaaacatttttatgtgttacattttggacatgggtttccatttcttttcagccataaagaagaaagtcctgagcatttctaggccttgttagactctcgcctgacagcaaagggcagaagtaaatttatttttataaagaccaagaattcaccatctactgcatgtttctaggtgaacacagtttacattttagattcctgaccacactttacacccaccagaataactctgaacacatgaaaacaaaacaaaacaacttctcactgttattaagaccttgatttgtagttggtatattctgactttccgagtggagctttggctgcaggccacagtgtgggcacacttagctctgtcggaccttcatctccctccagccagtctgtctcccatccccaggcccagagtgggcagatgaggtatgcactggaccaggtgtgcacagggcaggaatcctggcagcctttcctctaccacattagtgtttattgttggaagtagcaaaagagtgttgtttccacttttcattttttatcattcattatcctctctttataagaagctgtaactcccagagagttagaagtaggaggaagcagagtgagctctgcacaagggaagaagcatggtcaggatggggggagaagcgctggggatgcagtctagagtattgtctttctccgtgtcctgctggatgctgggttttccaggtgtagtttacaaactcccagcaatgtcctcaggcagtttcaccttgtgaccacatacagctgtgaaaatcacatatatttacacatttaaagtataggaatgtgggaatctttctttcttagaacttcttaggcacctaaagatttcagatttcctcaaaggactaaaggtcctgtaggtaccacgttggttgattcttcctggccaatattttacagttttggccactttcaactaagatttcttagtgatgtcgtgttgccgcctgcaatagttaaattctttccccattatgtttgtgctgattatactctaaaattatactaaaattggcctccagtaggttttataaaggtgaaaattatgaacatgtgacccagaggcttattttgtctgctgatcaggcttatttatttatttattatactttaagttctggggtagatgtgcagaacgtgcagttttgttacataggtatacacgtgccatggtggtttgctgcacccatcaacctgccatctacgttaggtatttctcctaatgctatccctcccctagtcccccactccacaacaggccccagtgtatgatgttcccctccctgtgtccatgtgttctcattgttcaactcccacttgtgagtgagaacatgcagtgtttggttttctgttcttgcgttaatttgtggaggatgatggtttccagcatcatccatgttccagcaaaagacatgaattcatcctttttaatggctgcatagtactccatggtatatatgtggcacattttctttatccagtctatctttgatgggcatttgggttggttccaagtctttgctattgtgaacagttccacaataaacatgtgtgtgcatgtgtctttatagtagaattatttataatcctttgtgtatatacccagtaataggattgctgggtcaaatggtagttctagttctagatccttgaggagttgccacactgtcttcacaatggttgaactaatctacactcccaccaacagtgtaaaagcgttcctatttctccacatcctctccagcatctgttgtttcctttttaatgatcgccattccaactgacatgagatggtatctcattgtggttttgattggcatttctctaatgactagtgataatgagctttttttcatatggttgttggctgcataaatgtcttcttttgagaagtgtctgttcatatctgccacccactttttgatggggttatttgttttttcttgtaaatctgtttaagttctttgtagattctggatattagccctttgtcagatgaatagattgcaaaaattttctcccattctgtaggctgcctgttcactctgatgatggtttcttttgctgtgcagaagctctttagtttaatcagatcccatttgtctattttggcttttgttgccattgcttttggtgttttagccatgaagtctttgcccaaggcaaaattatttttaattgaacatgaagttgtggatattatgttattaaagattaactattttcccgggtttagtgattatctttattgatcaggaaaaaaaaaataaactcacattgttgggataatctaaaaataacatcatgatattacagcataccatgaagaagttaactctaaaggcctacagtatataatagtttgagtttggaatcttttttttgtgtcatgcataactcaaactttgcatatcaccttcttcttaatctccagtgagtaactgctttatagtttcagactccaagttaggtcagaatactcaatatcaaatacttttgataataccacaaaatttaccaaagacatagatattttaaaaacaaggaaacaaacagaaatcttagaactcaataactcaatggatgatataaaaaatacaaatgagaacttcagcaataaagtagatcaagcaaaataatgaatttctgaacttgaagacaggtcttctgaaataacccagtcagacaaacaaaagaaaaaataaaaaagaatgaagaaaacctttatgacatatgggacacattaaaatgattacatatttgaatttcatgtgttccagatggggaagagatgagcaaaggcatagaaaacctatttaataaagtaagacctgaaagcttctcaagtctggcaaaagatttagacatctagatatagaaagcttaacaatcaccaaacagaatcaacccaaaaaggtcttcttcatcgtatagtatggtcaaactgtcaaaagtaaaagataaaaagagaattctgaaaacagcaagagaaaagtagcaagtcacatataagggagaacctccatcaagccatcagttgatttatcagcaaaaatcatacaggctgggagaaaatgagatgatacattcaaagtactaaaagaaaaaaaacacttctagccaagaatactgtacctagaaaagctattcttcaaaaatgaaagagaaatgaagtcttctcagacaagcaaaaacataaaattagtcaccattagactggttctacacaaaatgattaagggagccctacacctggaagtgaaaggaccacatctaccatcatgaaaaaacatgaaagtttaaaactcattggtagagcagacaagtaaatgaaaaagagaaaagactcaagtgttaaccactacagaaaaccaccaaactgcaatgataaacaatgagagagaaagaaaggaaaaaatgatgtacacaacaaccagaaaacaattaacaaaatgacaggaataagtcctcacctatcaataactaccttaaatgtaaatgaattaaatttcccacttaaaagatacagactggattaataggtacaacaacaatgaaatgacccaattatatgctgcccacaagaaactcacttcactagtaaatacatttattacctgaaagtgaaggaatagaaaaagctattctatacaaatggaaaccaaaaatgaacagaagcaactataattatatcagataaaatagactttaagtcaaaaacaaaaaaaagacacaaagaagatctttataaaatgataaaaggatcaattcatcaaaagtctataaaaattctaaatacacatgcacccaatttcagagcatgcatatatatatgtgtatatatatatgtgtatgtatatatgtgtatgtatatatatgtgtgtgtgtgtgtgtgtgtgtgtgtgtgtgtgtatatttgatacaggttctcactgtcactcagtctggggtgcagtggcatgatcatggcttactgcagcttcaaccttcctgggctcaggtgatcctcccacctcctcccaagtatctgggattacaggcatgcatcatcatgcccagctaatttttgtactttggtagggatgaagtgttgccatgttgcccaggatggtgtcaaactcccgggctcaagtgatccaactgcctcagcctcccaaagtgctggattacaggcatgagccaacatgcctgacccagagcacccataaatatatagcaactatttattagttctaaataatgaaataaactccaatatgaaaataattggggatttcaacactgctttctcagcattagacagattatctaaaagaaaatcaacagggaagcattggatttaacttgtactttagactaaatggatctaacagatatttacagaattttttttaattgctgcagaatacacattgttctcatcagcacacagaactttgctgggatagatcatacattaggccacaaaaaaaagtgggaacaaatttataagaatgaaaactatatcaaatatcttctcagaacacagtggaataaactagaaaaaataagaagaaccttagaaactatacctatataaatatatgaaaattaaactacatgcccctgaacaaccattgggtcaataaagaatttaagaaggaggtaaaaaacattattgaaacaaatgaaaactgaaacacaatatacaaaaatctataggatatagcaaaaacaatactaagcagaaagtctgtctgacacacaatgtactaaaacatataggatatagcaaaaacaggactaagtggaaagtatataacaaataagagacacacatcgaaaaacgtaaaaaaaaaagtcaagtaaacaaccttatagttagcctaaagaatgggaaaacaagaacaaactaaagccaaaagtagcagaagggaaaaataatacagagatcagagcagaattaaatagagactaaaaaagcacaaagattaataaaagttttttagtaagataaaattgataaactgctagctaaacaaaaaatagaagatccaaataaataaaattagaaacaaaaaagattttgaagcagaaattccaaagatatacaaagaatcatcagagactattaaccactatatgctagcaaattggaaaacagagacaatagataaattcctagaaatatacaacctaccaagattgaaccatgaaaaaaaagtctaaaacctgaatagaccaataacaagtaacaaggttggatcagtaataaactctcccaacaaagaaagcccaggactggatggttttaattctgaattctttcaaacttataaagaagaactaacatccatacttcttaaactacttcaaaaattgaagagtagggattttttcctaactcattctacaatgccagcattacgtaatgcaaaaaccagaaaaggacacagcaaagaaaggaaacaacaggccaatatttctgatgaacacagacacaaaaaccctcaataaaaaaactagcagacctaatccaacaacacattaaaaaggtaacacaccatcatcaagcaagattcatcccagagatggaaggacagttaaatatatgcaaatcaataaatgtgacacatcacatcaatataataaagaacaaaaaccatatgaccatctcagtagaagcagaaaaagcatttgatagaattcaacaatgctttatgataaaagtactcaaattagggaagggataaacttcagcataaggtcatatatgacaggcccatgactagtattgtagtgaatggggaaaagctgaaaggctttcctctaaaaattgtaataagacaaagatgcccacttttatcactcctattcagcatagtcctggaagtcctagacagaacaatgaagcaggagaaagaaacaaaaggcattcacattgaaaaataggaagttaaattgtccctctttgcagatgacatgatcttatatatagtaaaacctgaagacttcaccaaaaaactcttaatactaataaaatatttcaggaaagttgcaggataaagaatcaatacacaaaaaccagtagtatttctcaataccaataacaaaccagctgaaaaataaatcaagacaccaatccctttcacaatagctatgaaaaaatatttaggaataagtttaatcaaagaggtaaatgacctctacaagaaaaactacaaaacattgttgaaagaaattgaagaaaacgcaaactaatggaaagacatctcatactcatggatcaaaagaattaatatagtaaaaatgaccatatttcctaaagcatttaacagatttaatgcaatccctataaaaataccaataaaattctttacagaaatagaagatataattttattaatttgtatggaaccacaagagagcatgaatagccaaagcaatcttaagcaaaaagaacagaacttaagcaaaaagggcagaatgactttgaaatacactacagagctatagtaatgaaaaaagcatggtactggtataaaaacagacacagagaccaataaaatataacagaaaacatagaaataaatacacatattggcagccaactaatttttgacaaagataccaagaacatacattggtgaaaggatactctcttcaatacatggttctgggaaagctggatattcatctgcagaaaaatgaaactggacccctatttctcaccatattaaaaaatcaactcaaagtggattaaaagcttaaacgtgagatccaaaattataaaactactagaagtaaacatagtagaaacacttcaggacgctggtttaggaaaagattttatgactgagacctcaaaagcactgacaacaaaaacttttttaaaataaacaaatggaactgtattaaactaaaaagcttctgcacaacaaaggaataatcaacagagtgaagcaacaatatatgtaatgagaaaaatatttgcaaactattcattcgacaagagactaatatccagaatatacaagggactcaacagcaaaaacaataagaaaaacaaactaatcctattaatactgggcaaagtatctgaatagaaaattctcaaaagaagacatatggcctataggccaacaaatggccaacgaacagatatatgaaaaaaatgcttagcattactaatcatcagggaaatgaaaatcaaaatcatgatgaaatattatcttaccccagttagaatggttattttaaaaaagattttagaaaaattacagactctggaaggatgaggagaaaatagaagtcttatacactgtttttagaaatgtacgttagtacaaccactctggaaaacagtatggaagctcttcagaaaactaaaaatagagctactatatgattgagcaatcccactagtgggtatttattgaaaggaaaggaaatcagtatatcaaagggatacctgtacccacatgtttattgcatcattatccacaagagtaagatgtggtgttaacctaagtgtccattattaggtgaatagataagaaaaatatggtatatatacacaatgaaatactattcaaccataaaatagtaaaatcctttcatccacagcaacatggatggaactggaggtcattatactaagtgaaataacccaggcacagaaagacaaatatcacatgttatcactcatatagtaagagctaaaaaagttgatttcatgaagtagagggtagaaggatggttatcagaggctggaaagggtgtggggggaggtgaagagaagttggttaatgggtacaaacatacaattagatagaagggataagttctattgttaacatagttaatagaaatacattatgttggggacatttcacatattttcttctaggtattttgaaatgcatatttcaaatgctatatggcttatggaggaatatgcatttgaaatgcatatttcaaaatacctagaagaaaatatccgaaatgttcccaacacaatgaaatgataaatgtttgaggtgatggatttttaataccttgttttgatcattatgcatcatatgcatgtatcaaagtatcacatacaccccaaaaatgtgtgaaaatactatgtgttaataaaaatgggcaaaacaaataaaagtaaatgaaatgagaatcagagacttgtgggacacctccagtggtctgaattacatatcatggagtcccagaatgagaataagaatgcaaagaataggagtgaacatgaagcaagatagacacaaagaaaactatttaggcatatcacagtcaaactgttgaaaaccaaggaagaagagaaggtttaggaagcagccagatgataaaaaagcttatttttaaaaataaattcaagttgagagaaaatgttgccagtagacctacactacaggaaatactaaaacatgctcttcaagctggaaggacattaaaccacgtggaaacttgatacataggaagaagtgaagagcactatgaatggcaaataggtgggtatgtatataaaatatccaatataaactgtttcttttctcagttttctttcagataaataatactttaaaggacaagatgatgacacagtaaactggacttgataatgtatgtagaagtaaaagatacagcaaaaatagaaccaagggcacagtcagttgaggtttttatatttgtgaagtgaggtataggaagattgatgtgtcaatatgaagtttaaagtgatacaatattgactctaaagaaacactgatatattaagaatgcaatattatgacccctacagtcaatgaggagataaaagaggatcgtgaaaaaaaaatgatttaccctttatacagaagaatttgttcaacagagtagaaaaaatccaggggaacaaaaagaccaatagcaacatgtaattaagcccagcagtatgagaatcacattaaatataaatggactaaacattttaattaaaaggtaaaagttgtcagactggatttttaaaaaagcaacatccaactgtatggtgtatacagaaaatataatttaaatataaagatacccacaggtgggaattagaagaatggagagcatgtattttataaacaataaccataaaaatatcagtctattaatgtttgatgagtggtcttcaaaataagcaatgttcccaagagaaacattttattatgatttaaaaataatatgagttcatcaggaaaacataataattgtaaatatggtatgtaccttataacagagctcccaaatacaaaccaaaaactggcagagatgggaaaaacacagagaaatccacaatcaaaatgggagattttaatattttatgctcagtgttgataggacggatagacaaaaacattagtaaagatgtagaagaactacactaccttatgaatcaactgggacctcactgacatttatagagtcctggatccaaagtctccagaatgcaatttcttttcatgtgagcatggaacattcaacaagatagatggaatgctgggccatgatctactacttaggactaaaaagatttatacaaaactcaagtatcctgcaactggtgaattctttcaaataaataatatgtacacttttctaactctttcaggaaatagaggaggttgaaatgaatcccagataactctgtgaaactgggataacactgataaccaaaaccttccactgagattaagagtgacaaatgttacacaggccgggcacagtggctcacacttgtaatcccagcactttgggaggcagaggagggagggtcacttgaggccaggagtttgagaccagcctggccaacatcatgaaaccccatctctacttaaaaaaaaaaagccaggcatggtggtgcgtatctgtaatcccagcttctcaggaggctggggcacgagaattgtttgaacccaggaagctggggttgcagtgagccgagatcacaccattgcactccagtctgtgcaacagagtgagaccttgtctcaaaaacaaacaaaaaaaaaaatatatatatatatatatgtgtgtgtgtgtgtgtgtgtgtatgtgtgtatatgtatatgtatatatatggaccaatagccctcatgaatgtagatgcagaaattcttcaacaacatattaacaaatcgaaagaaggatcatgtatcatgaaaaaaatggggcttatttcaggaatgcaagcttcgtacaacattcaaaatccaaatttagatgacagcatagcaacgttatttataatatcctcaagcaacaatcagatctttttcaacaggtgaatggataaaaatgaataatttgctgacacacacattaacatggatgcatcttccaggctttatgctgagagaagaaaggtttacacacaagtgatagtgcatcattcgattaataccgagttataaagcagcaaaactagtctataacagcagaaaccagatcagtgactaccttgggctggagggattgcctgcaaacgggcacagaggaagtatcatgggggtaggtgttatgtggatgaggtagaaatactctgtttcataatttggatttgggctgcatgggctatatatatttgacaaaactcatcaaactgtgcacttaaaatctgcacgttattgtatgccatttatgcctcaatacagttcagttacaaacaaaaaaagtgcaaagcttttcagtgattcactgtagaaaatacagcaacatgtaaaaagttggcttcaaacctcttatttaaacacaaagtattaaaacaccaagtgtatggtgatgcctctcttatctgtagttttgctttcctcagtttcagttacctacaatcaaccacattctgaaatattacatggaaaattccagaaataaacaatcataagttttaaattgtgcacattctgagtagctgatgaaaccttgtgcacacactgctccatccccttatcacaaggagacggaggagtacagtaaataagctctttatagagagaccacattctcatcacgttctttacagaatagcgatgtaattcctctattgtattagcagttgttaatctcttacggggcctaatttagaaattaaactttattataagtgtgtgtgtataggaaaaaagcatagtatataactatacggtttggtactacgcacagttttcaggcattcactgggagtcttttttatattcaagaaatgcttattattaaagcagaaaggctcagaagcctcctgaaagcaaagatttgtcttcagattccactttttattatctgtgatctaaaaatattattttcttgtatgtctttaaaaattattatgtgcagtatgatcttaacttttaaaaaccaaatagaaaaagaccatgagaaatatacaaaatgggtgataaggttttttttaacctttttatatttcccatcttttctagaatgtggttgtatttctatgataatcagagaacgtagacttaagagtgtgctccgaacactactttgtgtccatacatacatgccttgaggaggcaaaaatgctgggatgatacacagtttatattaaactgggaaccttgtaagtggttgaaatatttggaggcttttgctttcatctacttttattcatttccagtaactttataaagagtatgttaaaagtactcaatttttctcgagttttcaaaatgcacccatctgggcacagtgccctctagagatccacctccattcagaatgtttatcttgtgagtgttgcagatctcaggacgaaatcactttttgtcaaccccaaagaaccagagctgggagaatgcagagtcggggagcttatgcttgcatgtctgagatgaagactgtcttgaaaacttctaaaataacctcacaagttccttcttggggactgcaacaatctgaatacaatgctttagaaagagcacctgcccagtgacctgatgccaattcttgctttgagtctctgaacctgatggccttcatctccaggcagctcatgtgaacatcgctgccagtacaggctccccctcgccctccattcttcgaaacacgtgtggcttgcgtttttggttataatccattcttctaattcttgtatacattcagtgtattgggaaatgtttttctctaatttttttgattgacaatcttataataactgtggcatctcatagtaaatgccgtgtgagttggttggtcagtcacatataaatgctacaggatggcttttgggggtcagttctttggcaacttttgactacatcataaattaaacagaggaaaacatgttctgttttgttcctcatctaaaattggtttccactgccatggatagatgcagatgcttttgcaaccctggaaatgctgagctctgcattcctgttggaagcagcaagattacaaaaagctgacaggtacaagctatagggtttgtgatcagctggtaggaacatgcctcattatatctgcaagctattgagttgatgtaagatttgggaccacgatgagaatcacgaggctctgctttctgcagcacatgaactccctcagagtggggtttgctcaaatgagcagcacctaccttgagctgactttggagatgcctgtgtggaaggtgggcacaggaccagaaggcctttccgggcaccctgcacatactcttctcctaaggagaggatgctggaggcatttcctccaatgtcagtgccagcttgtgactgcagagagcaaagagctgggtgtgctggggcagctggagaggaaggagctgcagaggggtaacactggcatgttccttctccttggccctcagtagatgggagcatttgaccccgctgagctaagcattagctcacagagacctgacttctcccctagctgctaggttatagaaaatattttctccagattgtgcaaaatacttttccagaggaaagtacattcagtgggacatgaaattcagggtttatcagtggcctccaagtgaaaagcgtcctatgaaagtccacagtctggagccaaagctgcacctacaagctctgcatgcagcctgattttataaagaaaaaatgggttttctcagtggggaattgcttttgatcctacacttttcaaaagtaatcttcaactgattttatgaaaggatgcatactattttgtttatttaaatattgtgcattgtatagtagaatcctctatgcaattttaagtggtggttttgcagtataattctagtacttctgcaaacagatagcacactgtagcaaacctttgaatcagcaacaaggggtacagagtatgtggctaaacacacagcagcattactaggatgaactcctatggcacagatttattattgtgcatgcaaataccacagttaaaattaaatgtatagggataattaaaaccttgccacagtatgcagtcatttataatgaattcctacacaggttgcagtagtctatgtagacaaatggtatttcagcaaagctaatatgaaatacacatcaggtgatcagaaggtatttcagtgtcattctcgtgcatgcaccaaaggtgaatctcttaccagaagttagagcccaacagaaaagggtaaccatgaatgaatatctgtaaaattcagctcagagttcaaatgttccaatattgccacttttgctattgagctattggccatggaattaataaatatagagaaacaatgttaggatgataacccaaacccaacctctggctatgtgagtttttttttctgccttcagacacatctgtagatggcgatgccgcctcttctgtatgacgctccaacctccctcagtgtccattcccccatcccacctgcgttgagggagaggcctttcatctaaaatcctagggcagggatgcaaagatgatttgaggtggaggagaatgagaagggggcttatatattagcacagacgaaaaataaatcacacactctttctgttaagcgtaagcattgtgtagagagtcgtatggaaacctcatccacgtggaagcgaagcctccaaggttccagggatctcatgagaaaccctggggaaccgccccccgtctcctctcaccgcaaaccaaccagagccagttcagcggcacagaactgttagggacattatttttgggcaggtaaagctgactgcagaggagacttggggtggatagggttggctctttaagtggtggattaaccaatgtgtaaggtatgcatttataaggaatgaagtctcaaataacgttctaatacatagtgaacatccagcagcttaacacttacgaacaagcaagtatgaaagacacttcatgccacccttctgagcctccagaaagcccaggtctgttttctcacggcgcccctgcttacagaaagtcttcttgcagacagatgctcggattccaggtgcaacagtccctggaccctatggtccacagagcccggagctcagggctggtgcttcccgtggacactgaagcaaattaaaacaccagaaatgccttgtgagtgtggggcttgcctgtgagcgcgggttacacctgtgagtgtggggcacacctgtgagtgtgaggcacgcccatgagtgtggggcacacctgtgagtgtgaggcacatctgtgtgaggcacgtccatgagtgtggggcacacctgtgaggcgcgttcttgccggtcgctggggcggcagcacctggttcattcccagcgagcccggctctgagatcaagatggctcagagagctcaggctcctctttgagaacgtggaatgggaggtgggtggatcctgtggcccagaacctacctccgaccctttcgttgttggactcttgcggggctgctgcgtggtgctgtggtggttgcatggctccttcaccttcccagacgggcttcctgtcgagagccgcagacccgacgaggcctcaccacttttccatctgggcccggctctgaccacagcacagagtcgttgctaccgataacaaggcagacccatgacctggacgcccgttggaatgtcatcagccattctatcgtgtgtctctcgacctaaactcgctgagtggacatttcaggttgttttggttttgcgtctttctcacggtctctatgcactgagcccagtgctgtgtctacaactttccctccagatttaggcccctcttctccttctccttcccttcagcttcttctctttcgtgcaatttgcagttggaaaacagcgggagaaaatgtcttaaatccgggtagaagagcacttctttctttccagatctttcagaaacaacctcacttgcttttttatcagttgaaatgtgttggacttgagttctgtgttccaggtgcctgcagatgcctctccccgcatgcagcctcctctgcctctgtgacgcttcattctcctttcttctgtacaggccccatcgtcaccttcctcgcccatagctaaggacccgaggtatgagaagcgctggctggacaccttgtccgtgcctctgtccatggctcgcatctcaaggtacaaagccggaacggaaaaattaaggtgtgtgaccattgtctgagatgggaaactttgatgaaccccgtgcacttttgccagttcctacaggccgctggttactccagagcgcttgactgtgacattagcaagtgtgcgtgctgtcttctggtagatttagcatttggaataaacaagttaaagataaagagaaaatgagaagtcaggtatcagaacagtgaatttattactaagaatagttctatctagggcaaggtggcatggttacttctcatgaaccagtcattagtaaaagaaattctatttttagttttaaatgctaacagaattagactggaaataaagactgacttcttgtccaagtctcagatgtttttagaaatgccacttaaactctgtgggcctctttttcttcagtaataaaatgagagggttagaccagcacctatgttaaataaatgctaactagcttgtgagtttggttaattaaataatttcaaagatgtaactataaaagttgatgtttctgtagcttttcgagtagaaaaatgtatgcttggctaattgtgctatttaattactgtggaaaggcccacaagtaatgagttggtgaatttcctttttctgttctttagacagatgtgtagaaatagcaaaccttctgtcagcaaaggaattttttttaattgagcactgtacttcccacaatgtgtgtgcatctgtgtgaatgtgtgtggctatagtgtgtgtggtctgtgtgaatgtgtgtggccgtggtgtgtgcggtctgtatgaatgtgtgtggctatagtatgtatgatgggcagacagtacaacctgaaattccctttactggtccttaaatggaaggaaaagtctagcaaacattgcttttcatgaagcgttagaattaggttttctatattaattggtattagctgtacagcctctcacaaaggatgttcatgtttgcggaaggatgtttatgatcccattgcaggaacagggacagtaagcttgattttcagatttgtgcccatctttggtaaagagagacaaacctagtaaaagatgtgtgtattgctagagaaatggaaagacaggtaggtgaatatgggtggatagatagatgatagataaagtggatggatggatggataggtagatagacagacagacagatagataatattctgcataataatgttttggtcaaggacagaccacatatgccatggtggtcccattagattgtaaaggagctgaaaatccctactgcctggtgacatcaaccatcgtaacctcacagtgaaagatatgactcacgtgtttgtggtgatgctgacgtagacaaacctactgcactgccaatcatataaaaggaaacagtaatgtcctggaccttcacattcactcactcctcactcatggcttcacccagaacaacttccagtcctgaaggctctattcatggtgagtttcctgcacaggtgtgtcattttttaacttttataccctatttttactttcacttttctaagtttagatgtgcttagatacacagatacttggttttgtgtatttagatacacaaatacgattgtgttacagttgtgtaagtattcagcatagtcgcatgctgtactggtttgtagcctaggaccaataggctataccatgtagcctaggtgtgttgtagcctgtatcatctaggtttctgtaagtgcaccctacgatgtaaacacaatgacaaaatcacctaatgacacagctctcagaatgtatccccatcattaagtaacatctgactgtagatatatagatgatttattgcagtcatagaggggctgaaatatagatagattacagagatacagatagatggataggtaaatagccatttgtaaaatatagcagaatgttttaacagttcgtgctctaactgtgaattccttttaaagtgtgtgcttgtggctttcttacaacatgtttctttggtttggggttaatttgggaacaaagtagagatctgggcatgtatctctcttgacaaagagggaaatagtgcatgaaatgacatttgtctattagcgtatttgaattaaatgggtttttagaaaaatagagccactgaacttcattacacacttcctagcccatctgccattgaatgtgatgaagattggctgttctagctttggtttaaggatgaattcaggtcataagatggaaatgtctcctactctgaggacaggatagggtctctacttgtattagtccattttcatactactgtgtagaaaaacctgagactgggtaatttataaagaaaaagaggtttaatggactcacagttctacatgactggggaggcctcacaatcatgtcagaaggcaaaggaggagcaaaggcatgtcttacatggcggcagggaagagcatgtgtgcagggaaactgccctttataaaaccatcagatctcgtgattcttattcactaccatgagaacagcatggaaaaaacccacccccatgattcaattacctcccaccaggtccctcccatgacacgtgggaattatgggagctacaattcaagatgagatttgggcaagagtacaaccaaaccatatcactagtaattcttaactaaatgcagacttgataacccattctggcagcttgagaacatgtagaaacacatgtgttattcttggtgacaaaatattttgacccactaagccattcataccacaatcattgggataaatacatgacatccaggagaatgaaatggaacccaagaagtcagccgactgcctgagcctcagattgtttctgttacaaaagctatcacacactgatttggtttggatctgtgtccccacccaaacctcatgtggaaatgtattccccagtgttggaggtggggcctggtgggattagatcatggggcagattctcatgaatgggttagcaaaatctcccttggtgctgtgcttctgacagtgagtgggttctcctgatatctggtcatttaaaactgtgtggcacctccccactctctctctttctcttgctcctgctcctaccatgtaaggtgtctcgctcaccttctgccttccaccatgattggaagtttcctgaggctttcctagaagcagaagctgccatgcttcctatgtagactacagaactgtgagctggttaagcctcttttctttataaattacccattctcaggtatttctttacagcagtgcaagaacggaccaatacacactgtaacagcaaactgaaaggtttataatttttcataagacaagaatattttgttttataaaggcaaatatgtcttactagcttgctgactgttttatgatttttaagcaagatttagtatgggcaggaaagggcaaataataaaacgcataagggcttaagctatgaattttataaaacctgtttgttctgaaacatatttgtgcaaagtcccatttagaggctgagatgctgttcttagctccaccttacctgtaagctcctcaggtctcattttaaatggatgaaaaagagaagagacttgggtgtgttgatcccagtggatggagttctaaaattcctgtgtatcttctcctgagggctcctcagtctaaggagggtaaggaataagtttagaaattgtcaattctaaatcaaacaggttttagaatcttaaaacaaaagctgtaagctgtagcccaggaggaacctttagatatcatataatggaaacataaataggatgaagaggttggaagccagcatcctgtgggtgtcccctctgactctgtccttgtccaagtataggacctcaatctataaccactaccttctgggtcctttctaaaaattgacaaataataatcatatataattaatgtacaatgttatgtttcaatacatgtttgcattatggaataattaaatcaagctacttggcatgtcagtaacatcacatgcttagcatttttgtagtgaaaatatttaaaatctactcttttagcaattttgaaatatacaatacagtacttactcacttaacatcattgattggtcctcagaaactgcaacttggagtgaaaagatgtataaagaaaccaattttcccataggctaatagctataaataagagttagattcttacagcatatttttggtcacaaaatatcaccaaacttctaaataaagaccaaaacacttcaaatattaaacattgaaataaatatgagctttgcatacatttaagaaagattaataaaaacaagtaagataattatttgcccaattatttcattcagggttggggagactggagtctgtgctggaagctcagggctcaagctgggcaacagccctggacaggatgccatcccactgcaggatggctcacacatgcccacagccactcagcctgggaccatttggacacagcaattaaccttacctgcatgtctttgtggggaggaaaccagagtgcttagaaaaacccatgcagacagacacagagcaaacatgcaaacctcacaaagatattgtttcttctgtcacctgtgcttttgggtcatattcaagaaatcattaaccaaataaaagtcgtggagcttttccctatgttttcttttagtagttttatagtttcaggtcttacatttaactccttaatccattttgatttttgcatatggtgtgagataagcttctggtttcattctcccacatgtggatatccagttctctgaacaccatatatggaagagactgtcatttcctcatgatatgttcctggcacttttgttgaaatcaattgaccatagatctgtgggtttatttctggctttttattctgttccattggccaatgtacctgtgtttatgcttgtgccttgctgttttgattattatagctttataatatgttttgaaatcaggtagtgtgatgcctccatctttgctttttatgctcaagatagtttggatattcagagtgttttatggttccatatacattttaggattgtgttttctatttctttgaaaaatatcattggaatttgatagagacttcatagaattttgtatatcattttaagtagtatggtatctaaacaacattaactcttccaatccatgaatgcaggatatctttccatttttgtgtgtcatctataatttcctttatcaatgtatatttttcattgtacagatctttcatctctttcgttaaatttactcctaggtattttatatttttatactactgtaaatgggattgttttattaatttcttttttgtatagttcattgttagtgaacaaaatactactgatttctgagtgttgttttgtatcctgcaaattttctaaattcctttattaagtctaacagtttttttgagtctttagagttttctatatataagcttatgtcatcagcaaacagagacaatttcacttcttccttttctatttagatgtgttttatttctttatcataattgttcttgttagcacttccagtactatgttgtatagatgtggtgagagtgcacatatttatcttgttctggattttaagggaaaacctttcagcttttcatcattaagtatgatattagacgtgggcttgtcacacgtgttctttattgtgttgaagtacattcccttcatacctaatttgttgagagctttgatgatgaaaggataatgaattttgtcaaatgtttttctgcatctattgctacaatgttatggtttttgtctttcattttgttaatatggtgaattagatttattgattttgcatgtgttgaaccatgcttgcatccaaggcatgaatcccacttgatcatggtgactgatctttttaatgtgctattgaattcaggtaactagtattttgatgaagatgtttgcacgtatgttcatcaaggatattggcctgtaatttttgtttcttgtaaggttctcatctggctttggtattaggataatgctggcctcataaaggtgagtttggaagtgttccctactcttcaattttttgtgaagaatttaagaagaattggtataagtttttcactatttatttggtagaattcagcagtgaagacatctggtcttcagcttttctttgatgaaagatttattatttttgttaattattattactgatttgatctccttacctgttattagtttatttagatgatctgtttcctcttaattccattgtgataggttgtatgtttctaggaattttttttaacatttttaaaagcgtgttttacactaattcttttttttcttttttttcttttttttattatactttaagttctagggtacacgtgcacaacgtgcaggttcgttacatatgtatacatgtgccatgttggtgtgctgcaccaattaactcatcatttacattatgcatatctcctaatgctatccctcccccctcccccaaccccatgacaggccctggtgtgtgatgttccccttcctgtgtccaggtgttctcattgttcaattcccacctatgagtgagaacatgcagtgtttggttttttgtccttgtgatagtttgctgagaatgatggtttccagcttcatccatgtccctacaaaggacatgaactcatcattttttatggctgcatggtatttcatggtgtatatgtgccacattttcttaatccagtctatcagtgatggacattcgggttggttccaagtctttgctattgtgaatagtgccacattgaacatacgtgtgcatgtgtctttatagcagcatgatttatagtcctttgggtatatacccagtaatgggatggctgggtcaaatgctatttctagttctagatccttgaggaatcaccacactgtcttccacaatggttgaactagtttacagtcccaccaacagtgtaaaaatgttcctatttctccacatcctctccagcacctgttgtttcctgactttttaatgattgccattctaactggtgtgagatggtatctcattgtggttttgatttgcatttctctgatggccagtgatgatgagcattttttcatgtgatttttggctgcataaatgtcttcttttgagaagtgtctgttcatgtccttcgctcactttttgatggggttgtttgtttttttcttgtaaatttgtttgagttctttgtagattctggatattagccctttgtcagatgagtagattgcaaaaattttctcccattctgtaggttgcctgttcactctgatggtagtttcttttgctgtgcagaagctctttagtttaattagatcccattagtttaattagatcccatttgttgattttctcaggttatctaatctgttgacatataattgtccagggcccattcagcatctacagtgggatgggaacccaccagcatgctggaggcacagacaggagagtccctctgggtccttgtgtgaacagtagtaatgtggttaggctttgtgtctccacccaaatatcatcttgaattgtaatcttcatgatcccacgtgcctagggagagacctggtgggagatgattggatcatgggggtagttcccccatgttgttctcatgatagcgagtgaattctcatcagatctgatggttttgtaaggggctctttccctttcactcctcactcttctctctcctgctgccatgtgaaaaagggccaagcttgcttccccttcacccttcacccttcattgttgctgtggggaatatgagcagggggacttcccattccaccatgtgccgacatcacccttgggtcttttcttttgttaagtaattagaccaatgatggttgaggttccttagttttctcagttctttttttaaaaaaaaaagactataaagagtagatgcatactgaagtctaattcattttaaatatgtatttatatgatacaaatcacatgtaataagtgcaactgtttttatttccatttgcctccaacatgttacaagcccgtgcactggcagaagttattttcctccattccattgtcagatcaagcttatactcaagtggttctttggtaaaatgggaactatgcatttggataaattatgtgtcattgtgaatgaggattaaatcattggctacacagtacgagaaaagattgttcactaagaatttgaagggagaatattgagatgaaactaaaaaagacataaaaacataagcattcttcctaatggacatcagcagatgccacagagtggggctttccctcaagttctccaacaggaaaataacccctgtcctgtgacactcggtaggtcgttatgcagcatcacaggtaacttagcataaccatgcgatcctgactactggcttatatagacattatgtagtctacatttctattatgtagaaatgtagtacattgtatgtagaaatgtatgtacatttctgttatgtagaaatgtctgttatgcagacatttctctgacatcaggtgaagaaaagcattgttgatggggtggccatggtggtggagatgctagagttttgtctgtctttaccatatcagttttctattgccatgtaacaaacctgtgcaaacttagcaggtaacacaagactgttttattatctcacagtcctcatgggtcaggagtccggcagctcccggctggtcctctgcttgggatctcaccaggctgaaaccaaggtgtcggctgggctgtgttcccatcttcaaggctcactcagggttgctggcagaattcagtcccttgactttataggactcagttccccacctttgtcagccaagggctgctctccaccaccagagaccaccatgttcattgacatggtcaccctctgccctcaagccagcagcaggtaacaggtaaccccataagcctccaatctatgacttccttcactctgacctctagacccagacgtaaagggccatgtgttcaggctgtacccctgcataaatctccctaactcaaggtcagctgagttgagacgttgattgcatttgcagaatcccttcacagaaacacctagtttctgttgattgaataactggagcagatgtttccaccaaggtctgagaactgggggctgccttagaactctgcctgctctagtgtctcaacctctgtttccctctggaaagcccatagcacgtccacgcttcttagaaattcatccttttaaaacaaaagtggcttggatgatggttggctgttcttccacatggtaccgttggacaaagctggatttgagccaggctcctgcccatagcatgtgtgtttcagaaaatagagagtgaagaaatacttaagaacaagagaaatgtctgtgcttgaaaagtatccacaatcattttgcaagtgaggaagcttcacaagaggctcagaaaagaggaagagctgtggtgcctctgggatgtgcccctggggaagcaggtggtatgaaggaatagtacggggataggaactaagagatttctaatcctgcttcaccctcttggggccatgacctaggtaactcatgggggctcttgtgatggcttctttgctggtttaaccaagtagggtgggagatgatataatactttactgctttctaagatagtttatgaaggtaagaaaaaataaaactgtacgtttaaaggaggtttgaagcagcaggagttcagtgatttttaattgtgatgcggtttaggtctgggtttccacccaaatctcatgttgaaatataatccccagtgctggaggtaggtcctggtgggaggtgactggatcacggggcagatttctcatgagtggtttagcacccaacccctcggtactgttgtgatagtgagtgagttctcatgagaaccagctgttaaaagtgtatggcacctgccctctttccttccaactcctgctatgcccatgtcaagtgctggctccccctttgccttccgccatgattgtaagtttcctgaggcctccccagagtcccagcagatgtcgccatgcttcctgtacaacctgtgccaccagagccaaggaagcctcttttccttataaattatccagtcttgcgtatttctctatggcagtgtgagaatggaccaatacaaattgtttatggaataaggaatgactgaacagaaggcaggaaattcagatttgagtgattatccccaaagatgagcaattaaacagctccagaatctctgtgccacagaatttctgtgcatcactttgcaactctttacaggaggaactgctttttatgcaactctttacaggaggaactgctttttatttatctgctcacaggagccctgtccatgcctcttgttttaggcaggcctcaaattgattaaaagtaattgactttcttttttttttctaaaacatagaaggaaagaaagggaagggaggggagtggaggggaggcgaggggaggggaggcggagaggaagagggaaagggagggagttaagtagtaagggaggaagagagaaaacccttagcttaggggtctttttgccccacatctaccatgttttttaaaaatacaatgaaattatgttttgtgagttacaataaaatttcatttgctttgtaggcactcaccttatttcagaagaagaaggcagatgggctctatagtagtcataatggaaacagacctactacagataagcagattttgaaaagtgatactgcaagtcagaattatactgctaaatactctaatttgttttgcaaaggagagtatcatgtttaaatagtcataccaaaaagaatcctgtggtgagttttctggaattcgtccatcccaagagcacagcactcgatgctctgagctcgcgcgtcccgcacacagggcactccttacccgggcttccagggagacagtgtcctggcagctgtggggcctcaggaaagggggcttgttatggaatgtgggaatgtgttgggtggttctaggaagggccaggagatcagggcttgccctgcactgggtgccgtcagagcgtgggctgtgtcagcagtgtctggcttaatttctatccaggagcatgagacaggaagtggcaggatccaggccaggcttgtgggagcagcagcccctccctcaggccagcagcccgccagggacctatgggacctttgtggttggacggcatgtcgtgtgtcccctgctgctgctctgccttgttgcctcatgtccctggagagccccggtctgaggttgatgacatgtgggactctgtgtttttcagaggaaccccacagccctgctggctgctagcaggtgacagagctgctgtttctttctcattacgccatctttaaattttctgaaaactttcttttgacgatagaagattagggtgttcatgttgacagaaagagaataatcccattccacttagatctctacaaacacccagttctctggcatgtgtcctactctgataagggcaggggccacgtgtttaagatctggaggtccttaagtcttctcagaagccagtgctgccttcaacacccggcagttctggtgggggtgtcttccgtggtgcccagccctgggccgccccctccacgggcacgtaggtgaatcagggtggacccactgctaagcagatgaatgactacctaaggtagctctcctgagtttgctctgatagagaacaagggctgctgattttcggaggcaccctgacacccctccccatccaacagatgtgcggagcagctctgagttgccttctctgggtggaactgcatctgctccttctttcctgggaattcagaatcattcttgagaaatcactctgcatctgtgtcattctcccaactcacttctctaggctccgttacgctttctctggggcagtggtccccacccgcactgtgtgacactgcttccgagattccccgggtgctcctctgtctctgagtctgtctctgcctctgcctctctctgtctctcagaggtctgtctctgtctctgcctctctctgtctctctgtccctctctgtctctgtctctccctgtctctgtctctctgttgctgtctctgcctctgtctctgcctctctctgtgtctctctgcccctccctctgtctctgtccctctcagtctctggttttgtctctgtctctctctgtctctgcctctgcctctctctgtctctgtctctctgtctctgtctctctctgtctctctctgtctctttgtccctctctgtctctctctgtctctgtctctagctctgcctctgttagtccctctctgtctctccctgtctctgtctgtcactgtctctgcctctgtctctgcctctctgtgtctctctgcccctccctctgtctctctctgtccctctcagtctctggttttgtctctgtctctctctgtctctgcctctgcctctctctgtctctgcctctgcctctctctgtctctctgtctctgtctctgtctctctctgtctctgcctctgtctctctctttgtccctctctgtctctgtctctctctgtctctgtctctagctctgcctctgttagtccctctctgtctctccctgtctctgtctctctgtcgctgtctctgcctctgtctctgtctctctccgtctctctctgtctctctctgtctctgtctctctctgtctctctctgtctctctctgtctctgcctatctctgtctctgtctctctctgtctctgtctctctctgtctctgcctctctctgtctctgtctctctcagtctcagcctctgtctctctctttgtccctctctgtctctgtctctctctgtctctgtctctagctctgcctctgttagtccctctctgtctctccctgtctctgtctctctgtcgctgtctctgcctctgtctctgtctctctccgtctctctctgtctctctctgtctctgtctctctctgtctctctctgtctctctctgtctctgtctctctctgtctctgtctctctctgtctctctctgtctctctctgtctctctctgtctctgtctgtgtctctctctgtctctgtctctctctgtctctgcctatctctgtctctctctgtctctctctgtctctgcctatctttgtctctctctgtctctctctgtctctgcctctctctgtctctgtctctctgtctctgcctctctctgtctctgtctgtgtctctctctgtctctgcctatctctgtctctgtttctgtctctgtctctatctctgtctctctctgtctctgtctctgtctctctctgtctctgtctctgtctctctctgtctctgtctctctctgtctctctctgtctctgcctctctctgtctctgtctctctctctctgtctctgtctctctctgtctctctctgtctctctctctctgtctctgtctctctctgtctctctctgtctctctctgtctctctctgtctctctctgtctctgcctatctctgtctctgtttctctctgtctctgtctctctctgtctctctgtctctctctgtctctctctgtctctgcctatctctgtctttgtctctctttttctccctctgcagcctctcagtcgaggatcttttcttttcacctctgaggattattcgttttttttcattttgactgtaagggattagcgccctgtctatgaaaagatgctgcaaagtctccgcttttggacattaagatcttttcttcgtatccaagcaagataaattcgtaacaagttgtctgctttaaacattaatttgatttttctttcctttgtgtgtggagatttcataggctatcagagtttgtgatgaaaatgaacaggaggggcttcttaagctggaggtgctggatcgctgtagaggaaagcggcgcagtgatggagggcgtctccctgtcctgcctgctggtggaggtgctggatcgctgtagaggaaagcagcgcagtgatggagggcgtctccctgtcctgcctgctgctggaggtgctggatcgctgtagaggaaagtggtgcagtgatggagtgcgtctccctgtcctgctggtggaggtgctggatcgctgtagaggaaagcggcgcagtgatggagggcgtctccctgtcctgcctgctgctggaggtgctggatcgctgtagaggaaagtggtgcagtgatggagggcgtctccctgtcctgcctgctgctggaggtgctggatcgctgtagaggaaagtggtgcagtgatggagggcgtctccctgtcctgcctgctgctggaggtgctggatcgctgtagaggaaagtggtgcagtgatggagggcgtctccctgtcctgcctgctgctggaggtgctggatcgctgtagaggaaagtggtgcagtgatggagggcgtctccctgtcctgcctgctgctggaggtgctggaccgctgtagaggaaagtggtgcagtgatggagtgcgtctccctgtcctgcctgctgctggaggtgctggatcgctgtagaggaaagcggcgcagtgatggagggcgtctccctgtcctgcctgctgctggaggtgctggaccgctgtagaggaaagcggcgcagtgatggagggcgtctccctgtcctgcctgctgctggaggtgctggatcgctgtagaggaaagtggtgcagtgatggagggcgtctccctgtcctgcctgctggtggaggtgctggaccgctgtagaggaaagtggtgcagtgatggagtgcgtctccctgtcctgcctgctgtggaggtgctgaatcgctgtagaggaaagtggtgcagtgatggagggcgtctccctgtcctgcctgctgctggaggtgctggatcgctgtagaggaaagtggtgcagtgatggagggcgtctccctgtcctgcctgctgctggaggtgctggatcgctgtagaggaaagtggtgcagtgatggagggcgtctccctgtcctgcctgctgctggaggtgctggatcgctgtagaggaaggcggtgcagtgatggagtgcgtctccctgtcctgcctgctgctggaggtgctggatcgctgtagaggaaactggtgcagtgatggagggtgtctccctgtcctgcctgctgctggaggtgctggatcgctgtagaggaaagtggtgcagtgatggagtgcgtctccctgtcctgcctgctggtggaggtgctggatcgctgtagaggaaagtggtgcagtgatggagggcgtctccctgtcctgcctgctgctggaggtgctggatcgctgtagaggaaagtggtgcagtgatggagtgcgtctccctgtcctgcctgctggtggaggtgctggatcgctgtagaggaaagtggtgcagtgatggagggcgtctccctgtcctgcctgctgctggaggtgctggatcgctgtagaggaaagtggtgcagtgatggagggcgtctccctgtcctgcctgctgctggaggtgctggatcgctgtagaggaaagtggtgcagtgatggagggcgtctccctgtcctgcctgctgctggaggtgctggatcgctgtagaggaaggcggtgcagtgatggagtgcgtctccctgtcctgcctgctgctggaggtgctggatcgctgtagaggaaactgtgcagtgatggagggtgtctccctgtcctgcctgctgctggaggtgcttggatcgctgtagaggaaaagcggtgcagtgatggagggcgtctccctgtcctgcctgctgctggaggtgctggatcgctgtagaggaaagtggtgcagtgatggagggcgtctccctgtcctgcctgctgctggaggtgctggatcgctgtagaggaaagtggtgcagtgatggagggcgtctccctgtcctgcctgctgctggaggtgctggatcgctgtagaggaaagtggtgcagtgatggagggcgtctccctgtcctgcctgctgctggaggtgctggatcgctgtagaggaaagtggtgcagtgatggagggcgtctccctgtcctgcctgctgctggaggtgctggatcgctgtagaggaaagcggcgcagtgatggagggcgtctccctgtcctgcctgctgctggaggtgctggatcgctgtagaggaaagtggtgcagtgatggagggcgtctccctgtcctgcctgctgctggaggtgctggatcgctgtagaggaaagtggtgcagtgatggagggcgtctccctgtcctgcctgctgctggaggtgctggatcgctgtagaggaaagtggtgcagtgatggagggcgtctccctgtcctgcctgctgctggaggtgctggatcgctgtagaggaaagtggtgcagtgatggagggcgtctccctgtcctgcctgctgctggaggtgctggatcgctgtagaggaaagtggtgcagtgatggagggcgtctccctgtcctgcctgctgctggaggtgctggatcgctgtagaggaaagcggtgcagtgatggagtgcgtctccctgtcctgcctgctgctggaggtgctggatcgctgtagaggaaactggtgcagtgatggagggtgtctccctgtcctgcctgctgctggaggtgctggatcgctgtagaggaaagtggtgcagtgatggagggcgtctccctgtcctgcctgctggtggaggtgctggatcgctgtagaggaaagtggtgcagtgatggagggcgtctccctgtcctgcctgctggtggaggtgctggatcgctgtagaggaaagtggtgcagtgatggagggcgtctccctgtcctgcctgctgctggaggtgctggatcgctgtagaggaaagtggtgcagtgatggagggcgtctccctgtcctgcctgctgctggaggtgctggatcgctgtagaggaaagtggtgcagtgatggagggcgtctccctgtcctgcctgctgctggaggtgctggatcgctgtagaggaaagtggtgcagtgatggagggcgtctccctgtcctgcctgctgctggaggtgctggaccgctgtagaggaaagtggtgcagtgatggagggcgtctccctgtcctgcctgctgctggaggtgctggatcgctgtagaggaaagtggtgcagtgatggagggcgtctccctgtcctgcctgctgctggaggtgctggaccgctgtagaggaaagtggtgcagtgatggagggcgtctccctgtcctgcctgctgctggaggtgctggatcgctgtagaggaaagtggtgcagtgatggagggcgtctccctgtcctgcctgctgctggaggtgctggatcgctgtagaggaaagtggtgcagtgatggagggcgtctccctgtcctgcctgctgctggaggtgctggatcgctgtagaggaaagtggtgcagtgatggagggcgtctccctgtcctgcctgctgctggaggtgctggatcgctgtagaggaaagtggtgcagtgatggagggcgtctccctgtcctgcctgctgctggaggtgctggatcgctgtagaggaaagtggtgcagtgatggagggcgtctccctgtcctgcctgctgctggaggtgctggatcgctgtagaggaaactggtgcagtgatggagggcgtctccctgtcctgcctgctgctggaggtgctggatcgctgtagaggaaagtggtgcagtgatggagggcgtctccctgtcctgcctgctgctggaggtgctggaccgctgtagaggaaaccggcgcagtgatggagggcgtctccctgtcctgcctgctgctggaggtgctggatcgctgtagaggaaaccggcgcagtgatggagggcgtctccctgtcctgcctgctgctggaggtgctggatcgctgtagaggaaaccggcgcagtgatggagggcgtctccctgtcctgcctgctgctggaggtgctggatcgctgtagaggaaagcggtgcagtgatggagggcgtctccctgtcctgcctgctgctggaggtgctggatcgctgtagaggaaactggtgcagtgatggagggcgtctccctgtcctgcctgctgctggaggtgctggatcgctgtagaggaaagtggtgcagtgatggagggcgtctccctgtcctgcctgctgctggaggtgctggatcgctgtagaggaaagtggtgcagtgatggagggcgtctccctgtcctgcctgctgctggaagtgctggatcgctgtagaggaaagtggtgcagtgatggagggcgtctccctgtcctgcctgctgctggaggtgctggatcgctgtagaggaaagcggcgcagtgatggagggcgtctccctgtcctgcctgctgctggaggtgctggatcgctgtagaggaaagtggtgcagtgatggagggcgtctccctgtcctgcctgctgctggaggtgctggatcgctgtagaggaaagtggtgcagtgatggagggtgtctccctgtcctgcctgctgctggaggtgctggatcgctgtagaggaaagtggtgcagtgatggagggcgtctccctgtcctgcctgctgctggaggtgctggaccgctgtagaggaaagtggtgcagtgatggagggcgtctccctgtcctgcctgctgctggaggtgctggatcgctgtagaggaaagtggtgcagtgatggagggcgtctccctgtcctgcctgctgctggaggtgctggatcgctgtagaggaaagtggtgcagtgatggagggcgtctccctgtcctgcctgctgctggaggtgctggatcgctgtagaggaaggcggtgcagtgatggagtgcgtctccctgtcctgcctgctgctggaggtgctggatcgctgtagaggaaagtggtgcagtgatggagggtgtctccctgtcctgcctgctggtggaggtgctggatcgctgtagaggaaagtggtgcagtgatggagggcgtctccctgtcctgcctgctgctggaggggctggatcgctgtagaggaaagcggcgcagtgatggagggcgtctccctgtcctgcctgctgctggaggtgctggatcgctgtagaggaaactggtgcagtgatggagggcgtctccctgtcctgcctgctgctggaggtgctggatcgctgtagaggaaagtggtgcagtgatggagggcgtctccctgtcctgcctgctgctggaagtgctggatcgctgtagaggaaagtggtgcagtgatggagggcgtctccctgtcctgcctgctgctggaggtgctggatcgctgtagaggaaagtggtgcagtgatggagtgcgtctccctgtcctgcctgctgctggaggtgctggatcgctgtagaggaaagtggtgcagtgatggagggcgtctccctgtcctgcctgctgctggaggtgctggatcgctgtagaggaaagtggtgcagtgatggagtgcgtctccctgtcctgcctgctgctggaggtgctggatcgctgtagaggaaactggtgcagtgatggagggtgtctccctgtcctgcctgctgctggaggtgctggatcgctgtagaggaaagtggtgcagtgatggagggcgtctccctgtcctgcctgctggtggaggtgctggatcgctgtagaggaaagtggtgcagtgatggagggcgtctccctgtcctgcctgctgctggaggtgctggatcgctgtagaggaaagtggtgcagtgatggagggcgtctccctgtcctgcctgctgctggaggtgctggatcgctgtagaggaaagtggtgcagtgatggagggcgtctccctgtcctgcctgctgctggaggtgctggatcgctgtagaggaaagtggtgcagtgatggagggtgtctccctgtcctgcctgctgctggaggtgctggatcgctgtagaggaaagtggtgcagtgatggagggcgtctccctgtcctgcctgctgctggaggtgctgaatcgctgtagaggaaagtggtgcagtgatggagggcgtctccctgtcctgcctgctgctggaggtgctggatcgctgtagaggaaagtggtgcagtgatggagggcgtctccctgtcctgcctgctgctggaggtgctggatcgctgtagaggaaagtggtgcagtgatggagggcgtctccctgtcctgcctgctgctggaggtgctggatcgctgtagaggaaggcggtgcagtgatggagtgcgtctccctgtcctgcctgctgctggaggtgctggatcgctgtagaggaaactggtgcagtgatggagggtgtctccctgtcctgcctgctgctggaggtgctggatcgctgtagaggaaagtggtgcagtgatggagtgcgtctccctgtcctgcctgctggtggaggtgctggatcgctgtagaggaaagtggtgcagtgatggagggcgtctccctgtcctgcctgctgctggaggtgctggatcgctgtagaggaaagtggtgcagtgatggagtgcgtctccctgtcctgcctgctggtggaggtgctggatcgctgtagaggaaagtggtgcagtgatggagggcgtctccctgtcctgcctgctggtggaggtgctggaccgctgtagaggaaagtggtgcagtgatggagggcgtctccctgtcctgcctgctgctggaggggctggatcgctgtagaggaaagcggcgcagtgatggagggcgtctccctgtcctgcctgctgctggaggtgctggatcgctgtagaggaaactggtgcagtgatggagggcatctccctgtcctgcctgctgctggaggtgctggatcgctgtagaggaaagtggtgcagtgatggagggcgtctccctgtcctgcctgctgctggaagtgctggatcgctgtagaggaaagtggtgcagtgatggagggcgtctccctgtcctgcctgctgctggaagtgctggatcgctgtagaggaaagtggtgcagtgatggagggcgtctccctgtcctgcctgctgctggaggtgctggatcgctgtagaggaaagcggcgcagtgatggagggcgtctccctgtcctgcctgctgctggaggtgctggatcgctgtagaggaaagtggtgcagtgatggagggcgtctccctgtcctgcctgctgctggaggtgctggatcgctgtagaggaaagtggtgcagtgatggagggtgtctccctgtcctgcctgctgctggaggtgctggatcgctgtagaggaaagtggtgcagtgatggagtgcgtctccctgtcctgcctgctgctggaggtgctggatcgctgtagaggaaggcggtgcagtgatggagtgcgtctccctgtcctgcctgctgctggaggtgctggatcgctgtagaggaaactggtgcagtgatggagggtgtctccctgtcctgcctgctgctggaggtgctggatcgctgtagaggaaagtggtgcagtgatggagtgcgtctccctgtcctgcctgctggtggaggtgctggatcgctgtagaggaaagtggtgcagtgatggagggcatctccctgtcctgcctgctgctggaggtgctggatcgctgtagaggaaagcggcgcagtgatggagggcgtctccctgtcctgcctgctgctggaggtgctggatcgctgtagaggaaagtggcgcagtgatggagggcgtctccctgtcctgcctgctgctggaggtgctggatcgctgtagaggaaagtggtgcagtgatggagggcgtctccctgtcctgcctgctgctggaggggctggatcgctgtagaggaaagcggcgcagtgatggagtgcgtctccctgtcctgcctgctgctggaggtgctggatcgctgtagaggaaggcggtgcaggatggagggtgtctccctgtcctgctgtggaggtgctgaatcgctgtagaggaaagtggtgcagtgatggagggcgcctccctgtcctgcctgctgctggaggtgctggatcgctgtagaggaaagtggtgcagtgatggagggcgtctccctgtcctgcctgctgctggaggtgctggatcgctgtagaggaaagtggtgcagtgatggagtgcgtctccctgtcctgcctgctgctggaggtgctggatcgctgtagaggaaggcggcgcagtgatggagggcgtctccctgtcctgccgtggaggtgctgaatcgctgtagaggaaagcagcgcagtgatggagggcgtctccctgtcctgcctgcagcccgggcactgatcttgtgtctctgccaactgcgtcggattcctcagtgcatcctgggatccctgtgctcctagccccacaaccacagctgtggccagagtcattttaccatgaacccctcacctcaatttcctggcaccctccccattacaactaaacatgaaccaaagtcactgagttttcctgatgctgaaaggggagaactatcagtgacatcattcgtattgggccaaattaatccccaaagagggaggagccaggcgtgtctggtggaaagagtggatggagaaggttttaaaggcacgagaccttcagggtgtacatgacctcagcacactaacctggctctgaagacctcgttttagtcagtgtgggctgccatagcccagttccacagatgggtgaccttagttccacagatgggtggccttacgcagcacacagatgggtggccttatgcagcagacatgcgtccctcgagctctggaggccgtagcccagttccacagatgggtggccttatgcagcaggcatgcgtccctcgagctctgaaggctgcaagtgcagggtcaggtggtcagtctggtgagggcctgtcctgcattgcagatggcaccttctctctgtgtctccctgtggaggaaggggtgagggtctccctgcggcctcttctgtaagggcacagaccccgtcaggctgcaccctcaggacctcatcacctctcaaaggccccaccttccaacacgactgcctcgggggctaggatttcaacactgaacgtttggggagccacgttcaatccactgggaatttgaccccagacttggggatgggagttgctagggacactccacttttaggaattaggccaaacttttccattactatggaagtcacactcttcaaaaactggatttaatttcattttttcttctatctgtgcctctgcctggagcacagtcctggggatgccacctgacccttgacctttgacctggcttcccagcctcctcatccccctctcgcctcctctgctgcatggccacccctcctgttacctgctctgtgcttacctcagagaccaaatctccccatgctctgcctcccaggcccctcacctggagtgtcccaaggcctctctgatgccgcgtgcccagcgtgggaggaggaggtacagacagaaccctcggcggcatctgcagaatgcattccatgttcccctcacctcattctcagtcttatctggaaacgcaaaactatcctcctggctgaatggtttcctgttgtagagatttttatgtttacctggactgggtccagtctgcaggccttgcctgggtgttctgaatcggggctcgcctcactctatggctcatttcagacgcagcgtttccatcccaggagaaagaatggaagccgtgataactcaggtcacaagagtggttacgttcctggagttcacggaacccctccagcaggtgcagttgtgtttaacacctaaacaaatatataggaaaaatgcagtgttaggcaggaaaacattgagctgtgtaagcagtggccattcacgtggctttaatgtacagaagaggctctttgttagttaagaactgaggttgtgaatcggagactgagttctttataaagctcacttgtgtatgtgtgtccctgccttaaccacttctggccttatgagtcaccttgggaaaattggtgaatctacatcctccttgatttcttcatctttaacattataacaacaggactttcttcataggatgattgtgagggctaaaaccactgcagcatataaagtaatttacacggtgtttattacaaggtgtgcaagaatatgtgccagctggttctttttatcctcgttttaaatgcagttgttagtaatctatgtgttatccgtcctcatttctcccaaaagtattaaatatttaaagacgtatgcaggagtatgaaaagaatcaggatgcttttgtgaaaggagcctaagaattctttgcacatcgttgaccggtcgtaaagtaagccgcagaaaagcagtgccaggaggtggaattgcgcatccttgtgtccggtcctctcttgagagtcggcttttactgcttttgtggttctgtaaagtccgtagcttacggttggcaggaaacattgacgggcggctctttgagccagcgcttctgtcattcctgtgcacactcagtcctgtgacctcccagtgtgggacaaagctccactcacgtctgcattttggggtggaatttaagcaccgtctggactaagaaatcattgcagagacgttcgttcccagggatctgaatgaagtagaaaagtgcagatgctcagggatgattcgtcctgctcttgagtgacaccaggtctttctcatctttgactcaggaggtgcagcccacggtgtgtgcagcttagcacacctgggcagggcacaatctgagggcacacggaggcccattaacaccagccgtgtattcagtgatcagattttatgtgggaaacatttcttgaccaccatttaataccattcactacactggaaaaaagaaaaaaaaaaaccttgctgtggattatgtgattaaatgataactttcaaaaacatattaaaactttcaaaaatgcattaaagttggaatgtaaggcattctattgaccaataccaaattctactggtttataaccattgattttgattccatgggctttgagatagcctgttaggttattgtcaatttagaggaaacctacatggttatgtcattagaaaggtggatttggattttaaaatgaaggttgatccctggaagaggacctggaggactgttgaacacaatgtgtgtttctcaaaaacgggatgattgctcagaatgttctccatgtacatggcgcccattctgccagtcacccagcttcatagaggttaaatcggaagcataggcagcagtgggtggggccgtgccacgctccatccccagcaccaactgggaatacaggcggcatttccgttggaatcaccccatcagtatggaaagacacaggaaaccaaagctctgctaaatggaggtgcaaggcctcgaggccatgacagtgacctcctggacacggaagcctgtgatacaccaaggctcacaccgagagaaacgtgggacccagcttgtgaaggacactcttcgactgaactgagagaaaaggtggagaccaagccaggcttcttatcttaattttcttcagctataggtaaaaccgcaagtctcttatgcaaaatagttatagaaaactaaattttgagagattaggacttagtcccagtaaatttagcctgtaagaatcttttagactgttttatttttatagacaataaatctatctctgtttcaaattgattgtattttgaatttttaacagtaacttcactcattatgtaaagtgaactcttaaaatgtgtttgttttttcaaacatgaggaatttgagcccataatcaagcccattagacacacttcacagcacctgtaacaggcagctgccttgcttccctggacagaaagcaggtgccctgcgtgctgtctgccctaagggagaggtgcgatgtataagtgtccttgtacattcagcaccaccccaactgtgtattttaaatcagtgtttacatttttatagagttattttatcatcactgaaagaggttctgcggtgttttctcctaagttaattctgcatttgcccttaacaacaaaaccaaaccaaacatacaaaatctcttccagtgatgatgaaatagctcttgaacagaagcaaacaaaacatgcatttatttccaagcaggaattgagcacctactgtgtgcactttccagggtaggaaggattcctataggactaacagcctgtccagctgatggctgctatgccgaggccacggatgggtggaggacagtcggcccctggctggtgtccagcgtctgctgctgcaggtgggtgttcgctccggaagtggaggagccgcccatgtgactctaatcaacagcattgttggtgtgggagggagagtcacggcagacagcctttgagctcgtccgctccgccacgaatccgtttccccacggtatccaccctggagtcctgcagcttccacacaagctcctcaggcctgttggagtgtgggcctgtgcagccgcagctggggaagctgagcttgggtctccaccaaagttagggcttgaaggtagcactggcctgttgcggtcagccttggtgtctgtcctctggtggaattaatcatttcctctgagacatgattatgttttacagtcaacttgtataaaatataaacaagttccctggtgattcttctgctcatactggtgccgctattaaagttctgctgggtgtaagcgagggcactttgctgcattctgtggcaccaaacaccgctctgctgggcaggtcggactccattctaaaaatgaggaagagagcctgagaggctggcagcctcccgcctcgtgcaggggatgaagcctcccgcctcgtgctggggatgagacagcacctgcagtgtccaggcctttctgcgactcaaggctggggtctgagtgtctgagtgctgcactgtgtggactgagtgctgtaccatgtctcagatctcagctagtgcttctgtcattcccgtgcacactcagccctgtgacctcccagcgtgggatgaagctccactcacgtctgcactttcgagctggcggggggccctcgtggtcatggactgtgaattacccatgttcacatgtgtgcttaaaatgtggctttgacatttacaaaatatggttctcttaggatcagagaacatggactgcaaggccggctctggccctgatccatctggtttctggctgtggttccctgctggggggaggagcgcctctctctcacccaggccccgttcagcacagctgtccagcccctgggagaccctcaacttccactgccatggtccatgcctgcacacccaggctcttgcccaccttggagggcctgctctgggcttccttttatcaacagatctcaacattttctcacgttacttagaaattactgctgtgtcccgggccctgagccacttggttttaggaagctgtggactaaagggacaggagccgactttggtgttgggtaaaagcgcggccacggcttctgttgctccgttcgttgtcaggtgtgcagcctccacccatgttccatttgatagtccagataattttcactctggattcatgcaggctactgtgtccagaattggtgggttcttggtctcactgacttcaagaacgaagccgcggaccctcgcggtgagtgttacagctcttagggcagcgcgtctggagtttgttccttctgatgtttggatgtgttcagagtttcttccttctggtgggttcgtggtctcgctggctcaggagtgaagctgcagaccttcgcggtgagtgttacagctcttaaggcggtgcgtctggagttgtttgttcctcctggtgggctcgtggtctctctggcttcaggagtgaagctgcagacctctgtgatgagtgttacagctcataaaagcagcgtggacccaaagagtgagcagtagcaggatttattgcaaagagcaaaagaacaaagcttccacagtgtggaaggggaccggagcgggttgccactgctggcttgggcagcctgcttttattctcttatctggtcccacccacatcctgctgattggtagagcctagtggtctgttttgacagggtgctgattggtgcgtttacaatccctgagctagatacaaaggttctccacgttcccatcaggttagatacagagtattgacacaaaagttctccaaggccccactagagtagctagatacagagtgtccattggtgcattcacaaaccctgagctagatacagggtgctgattggcgtgtttacaaaccttgagctagatacagagtgccgattggtgtatttacaatccctgagctagacataaaggttctccaagtccccaccagactcaggagcccagctggcttcacccagtggatccggcaccggggctgcaggtggagctgcctgccagtcccgcgccgtgcgctcgcattcctcagcccttgggtggtcgatggaactgggcgctgtggagcagggggcggtgttcattggggaggctcgggccgcacaggagccaatggagggggtgggaggctcaggcgtggcgggctgcaggtcctaagtcctgccccgccggaaggcagccaaggcccagtgagaaattgagtgcagcgccggtgggctggcactgctgggggacccagtacaccctccgcagccgctggcccgggtgctaagtcccttattgcccgaggccggcagggccggctgctccgagtgcggagcccgccaagcctacgcccacccggaactccagctggcccgcaagcgccgcacgcagcccccgttcccgctcgtgcctctccctccacacctccctgcaagctgagggagtggactccagccttggccagcccagagaggggctcccacagtgcagcggtgggctgaagggctcctcaagtgctgccaaggtgggagcccaggcagaggaggcgccgagagcgagcgagggctgtgagtactgccagcacgctgtcacctctcactaccaggatacagcattgttttaatgatgatgttttattctttgaaatggaaaaaggaaacaaagatcagtgagcaaacttaggcatgctgttgtgttatgatgacctgcctggtatatcagacacaattttataaacagatggcgcgggcagccaggatcagagggacgggcactggaaacttggatgtctgggggccgggactcaggagcagtttacagagaagaaaaggccgatgctgaagccgagaagatttcgggacagttctgtgagtgatgccttcacctggatgaaaagcgaagtcccattgtgatcacagatcaccctctgtcctgcctgctgctgggggtgcccacctgggtggtcgaggccaattggttggtctcgtttgatctcagataaccaagaagaagcactgagcccctggatgctggttgtgcatccctggagtaaacgcagataaccattccaccttgtgggcagcgcagtgcccagatccacgggtcccaccttacggatagcacagtgccctggtcgacagcgtggggcgccagacattcccaagcctaggcccgggccccacactcagcagctcttcagcccggccagtggcacaagcccccgctacctactgtcctgtaccctgtgcagttgaaatgacagtgcctcttccatagggtcactgcaggggtgaaatagatctgaaacataagttacttaggataatgacagtgcctcttccgtagggtcactgcgagggtgaaatagatccgaaacgtaagttacttaggataatgacagtgcctcttccataggatcactgcgagagggaaatagatccgaaaggtgaattacttaggataatgacagtgcctcttccatagggtcactgcgagggtgaaatagatccgaaaggtgaattacttaggataatgacagtgcctcttccatagggtcactgcgagggtgaaatagatccgaaaggtgacctacttaggataatgacagtgcctcttccatagggtcactgcgagggtgaaatagatctgaaaggtgacctacttaggataatgacagtgcctcttccatagggtaactgcgggggtgaaatagatccaaaaggtgaattacttaggataatgacaatgcctcttccatagggtcactgcgggggtgaaatagatccgaaacgtgaattacttaggatagagcctggcacaaagccagctcgtaatgagtgatggcctttatttagttctctgttgttgttacagctactgctgccactatcatatatgaccagttcttataatcaggtgacatgccccgcagtgtgggtatgaaaggaagcacaagccattcaatgcagcactgtgccctcgctccagatggtccccagtggagaggaaaatgatcatgaggatgtgctaaatgtgcatatgccagccatgagctcctcccttcacctccctcctctgtttccttcttacagcccagtggtgtgagcccattgtcagatgagggaaccccacagcgtggctgagatagggtggagtcagtcctaccagcaggcagcaggcagaggggagtgtagacaccaccttcccgtgacaaacccaggtgctggaatcctgctgggtcttctcaaacatttactcacaaagcaaacactcacgtgtgcctactgagtgccagggctgttagtgctggccgtggtggaatgaacaaatgcaggacgccctctgtgctgaggccctcagcaaacacacaggctcgtgatggctccacggcaagatgcatggacgtgcacagcattcctgaaggctgcttcctgttcttcccatccatagggaggccttcagggagtccctggacatcgtgctccagtgccccactcactggcctcagcatggcctgcacggatggggcctcctgcctctcctgcttctgcagcactgcccggggaagtgaggggctcagaagacccaaaccctgttctcatgaaccaatgggaagtgacagagaagggtgaggaggtgccctgtgagacaccacaggggagaaattctctttcttggacctattgaacttttctttgtctcgagtgaacactttatttgtggcctgaatttctggtaaaaatgacttttttttttcccctgagacggagacttagttgcccaggccagagtgcagtgatatgatctcggctcactgcaacctccgcctcccaggttcaagggattctcctgcctcagcctcccaagcagctgggactacaggcccgccaccatgcctggctatgttttgtatttttagtagagacggggtttcaccatgttggtcaggctggtcttgaactcctgacctcaggtgatctgctggcctcagcctctcaaagtgctgggattacaggcatgagccaccatgcccagcccaccatgactttttaatgaacaagttactacatagttcctgaacttaaattagccctctttattaatatttaatatggactatttagaaatgccactgcatgacagggaagtagaaaaaatatatttttctaaattgtactaaaaaataatatactacagagacagttttaaaataaaatatgtgaacgaaatttcaagatttttcaaattctgaaacatacacgttctgtttttgtctcgagtactcgtaattttcagtcatgagctaaaatacacacacatgcacacacacacacatgcacactctccttattttccaaagcatgaaggcttaaagtaaacaggcatgtgtgcaatgcacacctttcctctctgttaccacaggcacagagggaggtggtggccagagccgacagggagtgacaggctgtggttgtaatgaaggccaccagccatcatttatggatgaaagcttccttggttaaattttgtacgttccaatgtatttattctttaaaaactggacagcttattaaaaaggcgatttacacattttgactttctccggcattgaagctttgacgagcaattaagaattctcagtttttagggtcaaattttatagttactggaatcccacagcacaagggaagcagaaggttggaagagtggtcattggtagcggatgtagcaggggtctcggtttggggctttaatgacaactgctaatgctctgtgattggtttccgctgaaacagatgatttgaaaaagggtcaaatctgttgaggtgtgttttgtgacaggaagattcccagcggtgtgggcgggattcggaggcctttctgcatgtggacaggaagaccgcagcgaaggcaggcagtgtgaccgggcacatgagagctgggctgtggggcttttcccggcaggagccgcagggtgcagggttgaggctggcactgagcccacagtcaagagcgcaggaagaacggcttaaacagactggctgtcctccacaggaggtggagacctgagcacgtaacttcaattccttaatgtcctaatacgttaagacatgtgctttgaacgttattggaataaatttatttctcttagccaaaaactgaattgattcactttctagagtataagtctattttcagttttctctttggaattgaaaaattctctaagggcacgaggaaaccctgggaggagggtagacttttcaaaagtgccgacacagtcagtgcttgacttccccatggatggcgagtgtctgggagctggtttggtttcttctcggtggaccccggggtgccaagcgctctgccttcacttggtgtggctttgcttacagcagcttcctacaatctcatgtgtgtccatcaaagagcatgttagctcctgagcagcagatgctctgtgaattttagctccgataatgaccttggccacgtgaacaccatcctaaaaggcctgagcggccaccatgaggcgggtagagaggccgggttccaactgtgagccacggaggaaactcggaggaaaccgtgaaactcggaggaaacaaaggcccagaaatgccctggaagaagcggctcctgatcttgcatccagacgtgcctgaaagcagattgcgtgacttacactagttacccggcttctataacaataaaccaaacagtgaaccaacagtgagccacgctgtgaactttctttccctgtttcattaacatgttagtatctgccatcagcattcatgtcaacaactttcacagtttctgttcatttgatacttaatttttattgctttctttgataaattacagactaataatgtttatatggtacttacgggcttacaaataactttgtttcagttatcccatttgttcctctcagtattcctattttgtggtacggttggcatttgaagcccatcgtacggacaaggaaagcccagctcagaggtgagatgtccagcctgcctcatgaagctatggcataaacgtgcctggactgcagacgccttcctttttattgcaggacacagccgtctgcccctcgtgcgagtccgtgagcctctggggctccacgtgcattcactgcctcagggggcaaagctgatgatctttctcaagaccacagcatcgataaagggtccttcatggagcctgggtccactgtctctactcacatcttattcctgctacatcaatgatggtgtaaacctccaaaggcagagttaggactctggactcagattccttctcaccactgactttacgaggatgaccacagtactgaccctgctgagagcacccagtgttcagtcatccatgcatttggtgcatacgtcaccaaccctgagaatcaggaaatgccaactccctgagaagacactgtcgttagtacatgtgagctggagccaagcggtgaccatgcgtgtccttcacacgccctcacgcgcaaccagggacccccaattcatgagaggggggacccctgcccccatgctgccctgaggtccctgcaggccccaccaggcacccccgattcatgagagggggcgcccctaccccactctgccctgaggtccctacaggccccaccaggcacccccgattcatgagagggggcgcccctaccccatgctgccctgaggtccctgcaggccccaccaggcacaccctattcatgagaggggggcccctgccccacgctgccctgaggtccctgcaggccccaccaggcacccccgattcatgagaggggggacccctgccccacgctgccctgaggtccctgcaggccccaccaggcacccccgattcatgagagggggcgcccctaccccatgctgccctgaggtccctgcaggccccaccaggcacaccctattcatgagaggggggcccctgccccacgctgccctgaggtccctgcaggccccaccaggcacccccgattcatgagaggggggacccctgccccacgctgccctgaggtccctgcaggccccacgaggcacccccgattcatgagaggaggcacccttacccccacgctgccccaggatccctgcaggccccctagtctagctggatccaggaaaagctgcccctggcccacactggcaccaccccctgttcctccccaggcctttggagaagaacaggctcttctgaaagaataaaagcgtagagctctgagatggggaaaattggaggatgggacacagggaacttttgaggattcttctaaagtctgtttttggtctgagagttggttggccaagagtatggaatacatgactgtttatcgaggtgttcactggtgagttgtgtgcgtgtgtgtgtgtcctgtagctcaatgtaaaatatgcctaaaaataatagtctctgacctcttcatgtggggagccagggaacttggctgtcgtccgcaataatctacttgacccagctgtttattaaccactagattaaggtcagccttgctttgtatatgtcgcaccagttaacatgaacaaatgagaaatgatggcaatgaacccatttttagttagcacttactttaataagaattaatggatacttggacaaaagtgtagatataagtctgtcaatatttaataagcacctaattcatgtggaatattacacaatctgcctaaaatagtctcccagcattttgaagtgtaaaaattaatttattatagcagacatccaggaccaaaggccccacgggaagcgatggatcctgagggacaggtgctccccaggaggaccaggaaaggtgatcagaaagggctgtgcgaaggtggaggcagagctgcctgccctccccatgcaggggacctgcttcctctggcttcttcccctctccggctccacacagtcacctccaccttcacctctgtcctcctgccaagtcaagagtaccttgttcatcgccatcaggcagaatatcagccacaagtagataaacctcacattctgattcaagaaacactaattagaatgagaatgacccctagacagggatgtcagctttttaaaagaatgacttttaaaatagcaaactctggtctgatagatttggctcaaaaatatgcagaactgtgttataccatctctgtttcctaccccttctcctacacaccccaccttgcctaagaaagcagcgatgacactcacatttgaaagattattagaacatagcttagtgatgacttatttttttaaaaaaatatgtttgctttgttctgtattttatcttcagttagctgcttgagaccatggaggtattatgagtcatatacattaatatgcattgttttctttttttcttttttttttcagatagggtctcactctgttgcccaggctggagtgcagtggtgtgatctcggctcactgcaacctctgcctcctgggttcaggagattctcctgccgtagccttccgagtagctggagctacaggtgtgtgccaccatgcccggctaatttttgtatttttcgtagagatgggacttcaccatgttggccaggctgatttcgaactcctgacctcaagtgatccacctacctcagtcttccaacgtcctgtgattataggcgtgagccactgcgcccggccaatatgcactattttcttaagaaaaagtctataaaagtgtacatgacatttctcttttgcaaataggcatatgtaaagtatgtttttaaaaaatattgcatgacagggaagaactactgaatttgagacggttggttgttaatactttgccatgattgagttctcagcaagtggagtgtcatggagcagtggaaggggactatgttctcccaaagctcccctgtcaatcagaagcacacaggtggtcctagagaagggtggatgctgagtgcagagggtgctgggctgctccagcctcaccccatcaggagctttaagtgctccatccaaagggtcttcgaaagaataaccagtaagaatcctgcagacaataactccagaatttcaggagcactgttctttccttgacaaagtgcttttcatgtttcatcgaattagaagtagctcctgttaccaagggaattcggggtttggtcttggtctcagcgagcctgctgactgtactgaggcgcctgaggaagtggtgcagttgccccatgtcctgggtccagggtagagccctgctgagcatcagcctcgaaactcacggaggcaggcccgctcccgtcgctgcggggcctcctggacagctctctccctccccaggtggaatgcgttcgaggtgctcgccctggacggagtcagctctgggatcctccggttttacacagcccaggatggcaccgactggctgcgggcggtctcagccaacatcagggagctgacacttcagaacgtgagcacacggtgtttctgagtctctgctgatgctcattcgtgcatgaaaaataatggagacatcatgtttctgatgatttatgattaacccgaaacagaaaatcatgtacttgtttcaatgtgtcaaatctatgtctaaaaacattaaaaatgaagccatcagaatgtttccaaatcaaagagtaaggcaatgtctaacagctgagaatttcccatctggttttgtcttcctcctcccctctgtctgcctctgtctctctccctcccttcctctctctttctctccacacacatatacagaaatagttatatgtcataattttatattttacccaaatgcattgatacagtgtgacattttgagttggggaaacctaattgagttaaaagtataattctcccaaacattatgaagatttagaaaaaggcataattgagcaaaaacattacttctcaaatttgtactgcagtcccccagaaacgaaaaagtattctgtccccttaagtgatgtttgatattaaaagtcaacaggattttaaaaattaaagaaatgaaaagagatggggtgggaacgaagacttgatgacacgggcgttgcctggagtgatgggtgcctggactcggacatggagccgtggccgcagccctggcaactgtggcaggactggccgtgcctggaggcggccctggaccagccttgctgcccttgctccctctaagctgagttgccctgtaattgcacttcgatccctgctctgttccttcgcagcctggaggctgcagaggctgggtccagcttgcagactggccaggcgtggcccaccctgcggccctgcagatgcacccgccctgcccctgccctgcccaccacctcacgtctcccttgcaacctcccttcttcctgtggctgcaaaacagaagttaacctaacactgggggaagcagcaatgtgtgacatttctcctgtgaagacctcaggggcttcctttctgcaagcagagaaggaagtaccaggaccttcctaacattgtagttttcaaacgcaacactttaaattccaaagttatctcaataaatagggaagaaaggatggtgcttgacttatatttgcagaaatgtttgtgacgaggagcgcccttcagttctgtcatttcacaaatcagccctcataggcagggcagagaagtcagacaccccaatatttcagaacagaaatgtggactctgagctgcctcccggctgtgtggctgtgggctgtgggaacattatgattctgcacctccacttcctcggtgaaattttggaaaacaacatctacctccataggtcattgggagaactaaataaaagaaagaatatcaactgtgatcaccgtaattaccatcacagtaatactgactctcacaaggttatgtagagcagaaatcatttcctcacttttctcagatattggaatttaagcacctgctcttgaagtgtaacttcacttacataaatgctgatatttgaaaaagaggaattgaagcctgctagtaaagttgttttctactgctgccatgtttgtattgactctggctaggtcttcagataggaaatatgtcattaaagaggcctgtttcccaggacagagcgtggctgatgacttccagctgtcactcaggtgagccatcctggtgttggtggctgtggccctgactcttctgccttctctccacagatgaagatggcgaacaaatgctgctctccttccgaccaggtagggtttgtattttctgcttcatgatgtaacacatcaggtagggtttgtattttctgattcatgatgtaacacatctcgaaaagcagtctctggttttttgaaatttgatttgaaaatgttgataggaaaacattagcacatttcagactgcatttggtggtctctgccctgcctgttaattctataaaactgctctttctgtgggaatagcataggtcattctgatctcctgtgtatagattatttctctattggcagttatgttttgtaaagaatcgtgatttaaatgatgatttagatatgattgtttaaactgagaagggctttgagatgacacacctgtgtaatttgaaattttaagcattatattattttcttaaataaaatccttactaggaaagcttcattctcaggagggctttggcccagtgggtgttattgccagtgggtaggatcctgtcatccccaaatccaggcagtttgttcacctggagcccagagcccttaacgttgtcctggattcaggatagctacctttgtagccaccctcaggcctgattttctgctcacttcccacgtctatgagtacttaggaaaactctatggtaatcaagctgtttcaatatcagccaaatcagtttttaagccactgtgttattcttctgtttcctttataataaacttatgatttaacttgtaatgtaagggagtatgttatttatagttcattcattttctggttacatctcttaggggcgtaaggaagcatgcatcatagcctcaagttaagaaaactgagaaaaacatgttcgctttgctttaaatagcgcacaaaagactttaaatagtgcttagcaagaatatttgaattcacgatggaggacttgagaagagcaggtcctctgcctatgaaatatttactaaaacaatgggaaaatagggctgtgttttaaattaaacctctctagtcaacatttctacattagaaaagaaacactaagaataaatggttcttctaacttttatctcttttaatattattctaaaattaccatcaactatttttgtttacatagatattttatgattaatatttctataaattcttcaaattaatataggattcatttcatattcttatacataaaatatcatttccctactatgtgtttttgaaacagaagttctgaaacttttccacaaagtacatatctctctatggttcacacaggaaacagcctttatcaaggctggtgggacagtgggccaaagttttgacatgatctctatgaataatttaccattttgaaattgcatcttattcacacacgcaaaattagcaaaatgtttcctgagatcctctttatggcaaagctgagactcttccgagatcttaggaggagccgcagcttctggtatttctcagtgttggctgcttcttccctgtttctcagtttgttcgtcatgaggacagccgtcctctcccgaccctcagaggggttgtcaccttgcagacagatccttgatgctaaacagtgatgtccgcaagtggagagcatacgtgggaatgggcagcatttatggacttggcctttacgtgtttcagagaaatgctgacttttgtagctatactggaattactcctcatgttggaaagagcactgctccggagaggaaagcattttcttttttttttattattattattatactttaagtttcagggtacatgtgcacaacgtgcaggttagttacatatgtatacatgtaccatgtggtgcgctgcacccagtaactcatcatttaacattaagtatatctccaaatgctatccttcaccctctccccaccccttaatcctccttatcatcaactgacaagagagaatgatgaaataatggttcagagaaatgtaaaaacctgtagggagcacagtttccgctatggagcacattgaaggagcatcttccagagacctcagaggcagtgggcggccttgtttttgcttcatctcagtgaaattctcccacatattaagccttgtgtatttcacatcgatcttggtggccttgtttgacaaagcaaaaagccaaaggcaaaccctggacctgataaccctgaccaaacccttctctggtgttgtaattttaacaaattcactcctgaggcttaatttctttatctgtaatataagaaagttgtactgggtaatttaaggtcctttttacaaccttaaaagtcctatacaactttgaatttacttagcagcttggagtagtttatttggaaattgatcttagagctgagcttcattatgtaggatgatgaagaactagccctgctatatccggatgcgcttttggtggaggatggtttcacgttttctccaaaagtggtgtgctttgtacaaatgttaggagtttaaatttaagacattaggccctttaaaacagaaagaaaattttttttcactctgaacaattcattcttgattttggtatttaacaaataattgtgagataattgttaatgtgaaaaatgcgaattttatgtcaaaaaaatttatgtgaaaggataaataaaggtgtttaacaaccactgaaattggcaaacaaaaacacacaaaaaacagaattaggagaatactacaaaaagcataatgtatgcatttttagactctcatatctggtatataaaataaccaaataatttatcatacaaaccagagcacttttgtctgggacaaagactaacctgaaaacattaccaagataactgcaaacaaacatatgctcaccccaccaaatagcaagcagccctatttctttccaaattaaacttatttttgaataacctgaattttaatttaggtagctattgatgatgccttaattgccaaatctccctgaccccctgcagaaaaccctaaataacacaggtaattctggctttttctagctaaaggaaaagaccagctgcatgttatcatctggtggacgcttaactaattatcttgactgatggggtgaaaagaagaggactctcttatagaaatggtatcagaaaagataaaaaatatatttctttattataatggttatgacatccttattaaggtggtacagtcagggagatgtttctaaaagtataatacacacttcttggaatgtgtaattagaaaattcataatgtagaagataaaattagctttgcttaaaattatttatgaactgcatatacctaagaaagattcagaaagcatccgatgtttccaacaatagcaaagctataacgtatttctttgctaaatctagcataattcaattacttgtgtgatttaattaagctcatgcaactaacaggcatttcagattactggcggtctattattgccatcttgggccaacagtagctctttattcactccttaatacataactctccttgaactttgtgccaaacactgtgtcaacccgatatagaaaagaagaagagcccaacactgtcccagcccagggggaagaaagagcaagcagccctggggaagggaggtgggtgtacagctcatggggcctcccaggtctgggtgctcggattccagctggtacctgcagctcctcagaaacagagtaactctgctcaatcagaattagatggtaattccacccttgatcaagttctcctccaaaaagaaggcttgctgctgccatgctggaaaaagaatcccaagttctctattttagccaagattcaagaatgcatactttcaactttctactcgcccttgatctacctgtaatgtaaatcaatctctcacccatctgtcctctgtatttagatattcctgagtgttacggccgttagattaagttcctgcacatcagtttcctattcatagttcatcccttgtgaaatctaaattgcagcgcatgattaagtgtttcgtgaacagaacgagtaagatcaaggaaactcgacagtatgtgaacacgtgatttaaaaaatgagggagccgaggtgggcagatcaggaggccaggagttgaagaccggactggccaacatggtgaaaccccgtctctactaaaaatacaaaaattagccgggcgtggtggcacgcgcctgtaatcccagctacctgggaggctgaggcaggagaatcgcttcaaccctggaggcggaggttgcagtgagccaagagcgtgccactgcactccagcccgggcgacagagcaagactctggcctggggccagggtggtggtgggggtggctggggaagtggaggaagtaaaaccagcagagtttgccctgcaggcaaaagaaaaacatcactttaaatctctctaccccgtatgaatctaattaggctgtgacccttagaatttctcatcagaactagtatttgtttcgtgaattttaaagactctcagaccacgttggcagggacctgcagaaggggatgtgttcgccattcgctcgttttttgtttcgttcttttttctggatgtgattattctctactcctccctcttactaactttgtgatttgacgaggatattggtgtgactcctcgtaataaatatggggtcaaaccagactttttgtgcttgttgctgattcttaaaagtttgcaggccgggcgcgggggctcacgcctgtaatcccagcactttgggaggccgaggctggcggatcacgagggcaggagattgagaccatcctggctaacacggtgaaaccctgtctctactaaaaatacaaaaaattagcagggcgtggtggcgggcgcctctggtcccagctactcgggaggctgaggcaggagaatggcgtgaacctgggaggcagagcttgcagtgagccaagattgcaccactgcactccagcctgggtgacagagcgagactccatctcaaaaaaaaaaaaaaaaaaaaacagtttgcaataatttagaactcaggcaatttcctacattttctagaaattctggttccacactttgatgctaatcagtaaaagaaaggtcttccactcagccatcctgacaaatacaataagcttgtttttgcctgctgcagttatccagcagccagctgctccgaagatttagatttgaagatatggtcatcattgtttgtgaaacctcgcctaataaggccataaaaaatgatgagttcatgtcctttgtagggacatggatgaaactggaaatcaacattctcagtaaactatcgcaaggacaaaaaaccaaacaccgcatgttctcactcatagatgggaattgaacaatgagaacacatggacacaggaaggggaacatcacactctggggactgttgtcgggtggggggaggggggagggatagcattgggagatatacctaatgctagatgacacgttagtgggtgcagcacaccaacatggcacatgtatacatatgtaacctgcacattgtgcacatgtaccctaaaacttaaagtataataataaaaaaaaaggaaaaaaaaaagaaataagtcctcctcaagagctttagcaaggcactcaaatgtgcgtaagatgacctgggcagcctgctcagggccatgtgcctggtcttcctggaatgtgaactcttttcttgctgaacaaactgcctgcataatattcttttcatgactgtgtggaagccactgtgtttgcaattgtttttagtaactatgcttcaaatgaatcctatcttaaactgtacaaatcactgcacttgtgcagtagtgagctggaattaatcacgcattgaattcatgttaattatggaaacatcaagcatctgctaaatttgctagaaaaagatgcatttttaaatggaggcttttatgatttacagagtataaatgctagtgttataaccaacaaaaatataagtatgtgacccaaccagacaaaaaaggaaaaaatctattaggtattttaaaataatctgtgtatttggtttcaaattcagacactggaggagtaaattacacatcagtggcttttccaggtatgaatgtccctggcatttgcccccagctagtgccttatgagggattcctatgggacactgtgaaattcccgtaattctcacgtgagatctagaattctacccgtttcatgatggaaaaagagagccttggcaatgttaaatgtgctttgctggggagggtctcggggaaataaagtcgtcctgtgttactgcaacattaaccccataccacatctatgtggttcctgagcctccatgggacgtaagtataacccactaggaacttggaagttcatgatccagtgaaatatttgggttactttgaaaagccttctaaatccagaacagtcaagaaagacaaaactaaaacgtttaatgcatcaggggattcgtattcaacactgaaaaccatgatgatagctgttcggctacgcgtccccgccctacaagacagtgctcctaattttctttcccattgctagaaataccgtttgtagaaatctgattctgtcctctagcatctcgacttcccaggaagtctctccagcttaagagtgaagaccttcagtggtttatcaagtaaatatcagaaacaggatgcgcccatcctggagctggcgccggctgtgacgggacttacctgggcggctccagcagagggcacttcgtgggtgcatggggcttgcacacttgaggggtgtccaggtcccagctggttctcaacttttaatagctcatcggtcagtgtcatttggtaaagtggttgggatctctgtgataacttatttttatttttttaagtttttaatgctaagcatatgttaataggttttccttgaaatagaatgagaaaatgaaagaattataatgaaattactcctggtacttgctacaaaatatgtcacattaaaattttagataacatggatttttctttaatattagattgaattcactgaattcttaaattggattattatttaaatgtttttgaatcatattctgattttgataggttggattttatatcatacggctcaaaatattcactgctcattgtaagaatctaatattttacattatttcattgttgttaagaagttgaaccataaagagaaacaattatttttccacatatgccaacttctatgttcactataggaatgaaaaatataattagctgtttttactacctcatagaaaaatctgaaatactaccttctaatagaatataattcaatacagtcgttttaaaagataaaccaacaactctaaggcagctgagaagtccattggccaaaactgaaagtgctcatatataaaacctggttcaatgcaaaactgaatttttaattcaagatgtgattcattcctattgtgtgaacttgatttggaaacttggacatctccacgtttctcccgtctcctgattctgggtgtgttgacctgatgggatcatggcttgctcatgtgcttaactctgctgctgtgacagtatgccctcattaaggcttggtttgtaattttcacccctctgcaggttgtgcatatggggtgggtaaatgagaaactccaaggagctgactcctctcaaaccttcagacccaagttcctagcactgaagggcccgtccttctacgttttcagcactcctccggtaaggatgcttttgacactccacagggaggggctgctgggagggctattcctgtaggagggggaaagctacatctggtgtttggaggaggacagacagagtgcttggtcctgccgtttgctgtttctgcatggttggaaaggattctgcttgtagattgcttatttcttgctccaaatttataaattaacccatttctttctttagttcaaatagccattaagatattgtagagcttattccttcctcaaattccagctggtttggaggtgggatgcagaggctctgtgtcttagaggatcaattatgtagttgaagaagccaagaaacatacaaaatacaaccctctttttagacgtttccaatttctaaattttaaaagcttttattcccggatgtctcccaagttttatttaaaaaataagcagcctgctttagtggggtccataatataaatttatggctgaatgctatcgttctgcaatttcattttccagtgcccaccggtaccattctccccaaactgactgaatgtaatgtgtaatgtctagaagtttatcaatttaaacagctttacttttgagagtctgaccatcagaactgcaagcaaactaaaaacctgagagcttcaggtacctacacgttttggatgcatgtcacgtgcagtgttcatgggacttttttccattaaaaggaaatgaaaagataaaaccaagttttacctccagacatcaagacagtaataccctgcctgtcttttcgttgataaggatggctttttaagtaagcgttttacttgagaatcatttcagatttatggaaaagctgcacattgagtgcagagagccccgtctgcctccactcagctcccctgatttacacaacttacgtggccatggagcatctggcaaaccaccatttgacaatgatgcagcattactaaccacacttcgccctccagtcaaacttcagtttttctactaatgcactttttctgccccagagataacataggatatcatattggctttagttgcaaggttttgaaataaaccagcactttgtgcttattgcacctaaatgtttgcatgaataatgactgaattcccctcaaaacaaacataaccatgttctttaacatttactgctaatttgctccatattttcaaattcaagtcccagaggtgaacgtctgattggctgggctgattttgtttttgagcagagctaagatattcatgccagctcatctcagaggtattgaaagactcggaggaggtggctggcaccgcatgtacccaacctggaccacgtaccactgacactggagatgcatgaaggggctgaggtgtcggaggacttccatggacccatatcactccatgtgttacctgtgtggcctgtttaccagttggccttttatggaactcagggattcttcaaaccctaatgggcagatcctaattcaataaccattgaaaagcaagggttcaaaacagacaggtttcttggccgtgggtcttcacggaagttatgtcctgccttgggatgctccgagtgctggtagcatccaactcatctcagcaaggcccggctggtaaactgattgcagcgtcacaaagtgtccctggaattgctaacgtgcgtaaactcctttgtagcttgtagtgcacttctgtccattatataatttgattcttgagacaactgaaggcccctcattttagtgatgagtggcaagagcacacaatatcagagctccatcttgatacatcgtaactgttttatcatggagacctattgtaatataaatcgataactaaaaataggtattttcatcttagcaacacattgaacagacacattcacttgctttttttttctcatttgagtcttgcttttacagatgaaggtcatgtgtaaataaaatagtaaacaaatatacttgaccgaggattgttttggataatttatttaaaatcctctcttaatagactgtgggttgtattaactgcatttaataccagaatattcttacaatgtactgaaaatccagagtgcagggagtatactctctctggtcttcttccccggtgggaaccacctaagtatgtggcctgtcattgttcttcttgatacttgctctcataatttgtttgaaactggctgactttgcctgaaaaaagtaataaatacaaataagcaactttccttcagtattcatttgtattctgcttagttgtaaattatgagaccctgactatgtttgattttgaaataattcttttaaagaaatcctaatgtatctaaattttaagttgtgcttctttttcttcatacctgctgtgggtagagagtccatttcttattttaaatgcagttttgttttgttaaaatgcaggcgagtcttccctcagggccctgaggtcgctgccactcacactggccgggcagtgcagcatttgcaagggacagagaatcatttcctgggggtctgaaaccaggatatggttgtggagagtgagggctgaggagggcgcatggcactggggtgaggaccaggaacctgcccaaagccacaggaccagccgtgcgtgccgggaagccaaagtcacatttctatgtgtccaggaaggaactggaaatcgcagactcctcattcacgtagaggaagtgcccacaccttagcctgctgggttggtgcttccctcccccagggctgccagcctcctgccccttcctctggcccacaaagtccgtgctctgtctccgccacctggctttgccatggtttgttagggtttctttcttggtcatttaaactatttgaaaacaataaaaaactagcagacaaaccctgtatgtttcctctggcaacatctgcttgtccattccagatgctgcagctcctccctccatctctctccctgtctctctgtctctgtctctctctgtctctatttatatctctttctatccctctctctttctccacctgtcactgtctttgtctctctctgtctgactctctctgtgtctcttcctctgtctgactcatctctctgtctctttctgtcgtctccttctctgcccactctttgctcctctcaaggtctctctctttctccatctgtctttgtctttgtctctctctgtctgactctatttctctctatctctgcctttctctctgtctctccttctctgccctctttgctcctctcgaggtctctctctttctccatctgtctctgtctttggctctctctgttggtctctccctctctttgtctttctctctgtctctccttctctgcccactctttgctcttctcgaggtctcttcctttacttgctttccagtccctcagagacagtttcatctttggtgtgggaaactgtgccttatcttgtattcatggcccctttcttgtcttttcctataaaagttatctatcgtctctttctccttctgcatacactccggaacattcctagaacatgattgttttcattaacttcttatttctagtaatttctgcagaagatgacttggcaccatctccattctctcttcagagccatcagcagggcttctttccatcattgtggttctgaaggcctcgctattccttgtaaagggtcagcgaggacccgaatgagcctagagagtaattctcaagatttcgtaaacctgtgaagttgaattagccccagatagatttaccattaggctgcaatttaaggaagctggatgttactctaaagtgtacgcatccatccaaaatggtcattgacagtttagctgcccagatctctgaaatataaaaattttgttatcctcaagtaagcatagtttcataatttaaatttttaagtataaatatataactgttaattacaccaatatagactgcacagtctgtgaagcttttgagtctagtagtgcttaggaagctcacatagacccacacacatgcacacaccacacaccacacacaccacacactacacacaccacacacacaccactcatgcacacaccacacgcacaccacatgcacacaccacacacatgcacataccacacacataacatatgcacacaccatacaaatagaacacacacctcccacaggcacataccacacacaccacactcatgcacacaccacacacaccgcacacacaccacacaaaccccacacacaccacacatgcacacaccacacacacatcacatgcacacaccatgcacaccacacacacaacacaaatagacacacaccccccacaggcacacaccacacacacactacacgcacaccacatctgcacaccactcatgcacacaccacacacacgtgcacaccactcatgcacacaccacatgcacaccccatgcacacacacccagaccatggcgtgtggatgtgagaggagggactccagccggcagtgatgctcccatttgctgagatgggaactgtgggatgtactcattggtgagtgctggatctttgtaagtttgaaatgtttaaagatttccaaagggaggtttttgagtagagttagatccaccaggcttgagttcagagacaagaactgggtagccatagaaactctggaggcgcccagtacgcagagagctcccgatgctgtgaggctgcaggaaccgtgagttgatctaactggatccttgatgatccacgagaaagaagccactcatttcttctggatctggataatttgtactttttcagtggtaatcaataataccagtaatgcactggagagataaaaaggtgcaggtttttatgaatattccatccaaaagttagattgatttgacttgttttatctgtatacttcccgatgacttcatatagtttataaatttctagtggtctccaactgtcattacttaacgtcacctgtaaaatgagaatagaggactgtaaatgcctacctgagagggttgtagggagattaaggaaggatgattagtacattataaatatcatacaatggatcactggtgtggaagttttctctcttgataaaacactggaaatgcaatttggtttccatggacctgggagctgcctgtgctgggctcctgctgcctgcaccatgtccagcatcacctctgacatagagaagatgctgcctggttacaggtggaataatctataaaatcagtactgaggcctattaatgcttggcggtgggctgagtgttttgcagaggtcatcaagtcctctctaatgagaacatcaaggagaaatcaacccctcatatttgcactccagcctggagaacaagagtgaaactctatttcaaagaaaaaaagctgtaaaagcatttgaatctaacagacaaaatcatgtattagtattcaccaacttctcattgcaaaatcaatacacacaatatggtgaataaatttacatctaaatatttataatgtattaatattttttctggcctgacattttatatcctggcactggtggcaatttgccagtagcagtcttactttgcccagatctaaaacaaccttatgttaaggttttaacatcagtatcttaaatgtattttatcctgacataaacatgaggtttttggatcagagacaggttgttaattactcacagaacgtctcaatgctggttccccatccctgccccagagttctgtgtgggcagagatgtcagccatgggagaagcacgtggggccatgactctcggagctcatataggatgctcagcacccacccaccctcctccccacagaaggagagactcccccttactaacaccaatcagacctctctcaggagagaaagccgaggtctctcttccatcacactttggaatataaaccaaaggcttcaggggccatccgtgtaaatgtccctgaatgattcactattgccaactcccatggctgggtcactgcaccatcgtccttcattccaggtgccagtgagtgttgctcagaaagccctcactatgcaataatgtagaaatattcacagagcttcgattctcagcagtctacgtcagaaaattttagtgaattttacaaggacccaaagattatcatggcaacttaggaaaaactaaaaggtaaagtccttctttgaacggtggcttttgatctcgttcaagatgaggaagaggaagaatattgaaggagaatagagaaaagaaggtgtattcgtctgtgttcacattgctctaaagaaatgcctgatactgggtagtttataaagaaaagagggttaattggcccacagttccgcaagctgtacaggaagcacgtctggggaagcctcaggaaacttacagtgtggcagaaggcaaaggggaagtaggcacatcttacatggccagagaaggaggaagagagggagcgggaggagatgtcacacttttaaacaatcagatctcatgagaactgtatcacaagaatagaaccatggccagagaaggaggaagagaggaagggagaagatgccacacacttgtaaacagtcagatctcatgaaaactctattaggagaacagcaccaaagggcaaatccacccccatgatgcagtcacctcccaccaggctccacctccaacagtgaggattataatttgacatgagatttgggcggagtcacagaccccaaccgtatcagaagggaaatgggatagaagaatggaaaggaggaattggagtggaaaaagcaggtccgtgtttcacagctcagttgttccgtgaggagggcccggcccaccctggtgggtccctaatctctgtctttcccatgcaccaggagatgctggaagagctgagattaaagccgggactctcaacaactcacacaccctactctccctcgttagccagagtatttatttctgatttgtacattagaatctgaaagatgtttcagttattcctgttttcaaacatcattaaaatgtgtcaaaataagttataaagtcaattttacagaattgtatggcattaatatatcaatgatgtagcaactgcctatgcatatgcaagaattattagcaatttaagactatcaattacataggtatattctatcattaaaaatattacttggaaaaaataattcaaatgaagatttgtagatggagcaaactatattgttctggggccacatattcattgttctatgataacagtcaaaggtaccaagttatggcatcttgtaatctacaatttcggctccatttcaagccaagtgtggccagatacttagaaaattgtcaattgccattattaggaaaaccatagtgatgatatatagttacaaaaccacccatcttgtctaccatccgttacgtctcttttgttccatgagagtctggagaaaatccaggaatctgcatacctcgtgtttccttgccctggtgttaagtcactgctctgaggaagaagcatgatggtagagccagtggatctctctccggacatgcaaaatcattccccagagaaaatcggctgataaagtgcctcagagaggttcacgctgcatgggcccctcttagcagagggtttcccctcttttaacataagaggtgcggtcctggaaaatcgtgtaaactaagccatgatgactgcattagggagccctggatttcaggaagtcgtggcgtggagtctggatttcaggaagccatggcgtggagccagtcatttaccaagtcaggaattcgtttgtccaatgagcggtgattgaacacgcctctgcagtaaggaattcgtttgcaattcacagtggctgcttccatcccaccctcggccttcctttccttttaaaaggtgtcaggcttcttatcctcaggttgttttcccacaagaccaccacgtcagactcccctcataaaacatcaagaacaccaatgtacctatgaatcacctgggaatacttcttgaaaacacaggctgtgatatggcaggtctggtgcggacctgagacttgacatcaccaacagggacccagagatgccgaggctgttgctggccttgctgcactttgggagtcatgatggatacatcaacaataaattgcttaaaaataaaaagtcaagatctctgagcctcactccaaacttgctaaatctgaaccgcttggatggggcgcaggaatctgcatcggcaggtgacgcctggccacactcaggcatggcacaaacacactaggagtgccctgcttcagaacagtactccaggctttcagtattgtcactgcatcatgggctatgcacacctagaattttgagctttacattaatcttctaattatatgtgtgtgtgtgtatatatatatatacacaaagttgtatgtatatatatataaatatatataaatatatataaatatatataaatatatataaatatatatataaatatatataaatatatatataaatatatatataaatatataaatatataaatatatatatatataactacatgtgttaatacacatacgtatgtatagccacgcattgcttaaggacaggtatatattccagaaaatgcacagttaggcaattttgtcgttgtgcaaacatcatagggtgtatttacagaaacctagatgggctgtatatttttatttatgtatattttcatatagaaaaccaaatgtttcggcaccattactgcctatgagttccttcctctagttgatctgcaaggccaggatcaagttccatcgaccgggtttctgtatatgctccattagaacctatggggccaccgtggtctgtgcagttcattgttaactgaagtgtcgtgacgtggtgcatgactgtatagacacacacgcacacacatttgtatatgcatacagagagggttttgactagctttcctaacattaagctcaatttagccaagttttttcacttttgttgcagcaacctacctcctatctgaactacaagctacgcagaacctaaccaacacacgagatgctcttcttggataccttggacatggttttatcttaaataacccccttctgttacatggtcatgttcggccttgaattgttgtagcctagatattttctagagctataactcgtgaaataaaaagtgagaagagccctaatggacatgatgaattttttggtgattttttttttctggcagaaactcagaggaacctgatgcctgcactttcactaaattagagaagcattcacatcacatccatgtagggagaggaaggatatctgtgaaaggctggagccaggctgagggtgctctgcagaaaggatcactcacatgaagtcacctgagctgcgtgtcagcagggggaagccgatggcagggcctctgggacttggaagaggggagggagacctgccacggctgtcaggaaaagcctcagggctgggtctgagctgagtccttaagccatgcggttcaggtaagcagggaaagaacaatgatgagaaagacccacttcttcttttttttttttaattaatacacttgttttttggacgattttagatttacagaaaacagtggaaggtgaagagtagcctgtgcccctcactgcccccacctcccctgttcctaacacttgcatcctctggtacattgtcacagccaggagctagtgtggatactgccacacccataacatccatgtggctcaaggggacttcccacagctctcagggtggcagcattttcttcaagtccacaatagaaatggttccatccgaagcccgaccaccttcttacctgtgtctgcgatcgaggcacattctcttccctgaatcaatcatgttggcgaagatgatgagaattctggcctgaattgtgtgtggactgcgccttgcctccctgggctgtgggcaaggtcatagctctgggagcggagaagggatccccagggggagacacggccactggcaggaggaataaacgagtaggaggaaggcaggactacggcaaaaccagcagacgccacagggacgaacagaaaggggcttaataaacagatgatggatgcagcggaaggagggagagactagacctgcttctgcgaacaacaaagagcacagccccctccaagctttgtcttagaacatgactcaaatccctgctgttttgtcacatattgatatcagactagtatggaaaatgcattcaatgtgacataatctaatacagtgaccagatatattaatcacagcacgatgacagcggtgaaaacctaaaagcaatctacaatgtccatcacaaagataaagcttacaaaaaccgtaactccacacggaaattctaagctgtagttacagttgtatttctgaataacatttaatgacatgggaaaatgctgatattactaactatattttgaaaagtgtaaaaccatgaatatgcataaggtgtatttatagcaacaagtaaacttgggaagatgtctctgaatagggtgtttagtgggttttttttcccctttatatttacagccttcaaaaataagcagcattgtcctaactgggaaagataaaaatggtggatccacaattctgtatttgccagtaataaaaccagcacctgagctctgacattaggcagtagcataaaacactggccagggtgggaacgggaggagtgggaagggaggggcaggtgcagtgttgaggaatcagcgggcactgctgtggaattcagggtgatgttttatttcaggcatccatcagcatggctccccagctctcaagagaaggggtgctggagttctggcttttaaactctgaaataagcacctgaaactccctctagcaaattcgagatgtaactcttatggcctgaataccagatccaaaaggaaccttaaagttcgtattctaattggccattctcactttcaaattgttccctttacttattgttttattgccaaaatcacaattgcaatgagctgactctagggcaataaaatattaaatagcaaaactatttgtgtaactttccacatttcagttgtgatgacttgaaaaatgtcttgaaaattttgtttgctgcaaggattaccagaaggtccccaattaattaaagccaagataatttcagtgtttcaaagacataattccgtgcactttggattatttttactggctgaaggaaaaagtgcagggtcaacaataaaaaacatcaaatttgttacattgttgaatattttagatttttctgcatgaaatattttaacttagagattaaatatctgagcttgaattgtgaaacatacagcattattcgacagtgagattagtttggccattattattgttaaaatagttgtgaactacaacagctcagaccaacgaaaaatgtattcaattaaattggttagtagatttttcattcatttctgaaacagaactaagtttagttctaaaaagcaaaagactgtctacacaatattttctgtccatttttgtactccagtaaatatataaactcattcactttcacatgcattaaatgttacccaaaattaatccctaatttaatctaaaaggaatccaaaatggttttctaaaattatgcccaattgcatgtgatagacaagatatcatagatatcaatcttatctatctaagataagataaaggagatagacgttttcctgtcggtaaaggatctattatatttgccacaaactgacaaagatgaggatgtggcaactcatcaaaactcacagcagtacgtaaagtttaatgttaccaatttatactaatggggcttaggatttaattgaggtggacacacatgcagtcacactattgtaaatttttaaatttttcaactaaaagtagcatgctgcttttcatggaacgttctctgtttcttgcaggtgagcacattcgattgggtgcgagcagaaaggacctatcacctctgtgaggtgctatttaaagttcacaaggtaggtatcttttgcacttcagatgctttcatacaaataagatgccctttgggcttgcagaatgagaggattgtttgttctgcgtggtccattgaaatagtaaaatttgaaatagtaaaataatgtgacgatctggacccattctcctgccctacctggtacatgggttctagctgtcaccctgttgcttatcaaggcaggatgaatggatgacagggtgtgtctgtgtttatgtggtatgtggtgtttgtgtgtgttttacgggagagatgtgttttatgacatccacttacaatcatttattccaagaactttagattttgttactgctgctgctgttattgaaattgttttcaacaaatcagatacaaatttgccccagggtctggccagtttgctgctcatggttcctagggtaggtaaggactgagccttcctccaggggacacacctcactggtggggctgcccggagcctggaggtgcagcagggccctagcccaggcccccgcccacctgactgcagaggtgtctccacagcaaggcgacgatgcgctcaccgtggccgggtgccaccgtgtcctagtatgtgactcagtgcatcatgtaaacaaaccacctgtgtctttttcatgtaggagtacacaaaacagagacaaataggaatattaagtgaaagtttaaatgtacgtaccttttagtctgagaatttgactgtaaagagttatcagtctaaagttagaagttttgaataaagatttgtctttcaaagtttggtttgttttcttaaattgaaaatatcctcaaaaataatattctctatctgtagttgctttattttaaatttaaatctggaatttcagactgcctttaatggaaacatgtacaagggaaatacatttccataataatattatcaaatgataaatacatttatttcccatttttgaaaaatttatttgggcaacatttttctgcattgttcctacttttgttgaatatggtaatgaaggagatgaaggaaaaggccggatgtatttaaattaagactcctaattacaggttgtaataaacaatcattgatcagaaagtgaacatttctgtgctaggcatattcattaaaaaatggaggaaaatagaataaaacattaactgtggttttctctcagtgatggcttttctagttattgttgctttcattttaaaaattattctgttttcgaaattatctgtgacaggaatgcattattttgaaaatggcaaaaaggaagccttatgttaacatgagcctcttggtcgtagatgatatgcaggtcatttcatccatcacatttccacagaagaattcgtagaagaattcttggcctttttgtttccttcgcatgggctcctcatcaacacattttcgcttctcccccctcttgtttcagaggattctccttccgtgcacctgagatgttctttaggtactggggtgtctttgagagattattgtatcttacatatgtggttcattagtaagctatagagccatctcattttcccaggaagattataaaaaaattttagtcagtaaatattatatgaagtatttatgaaatcatgaaattagccagtagaatggctatggcaaaggtattaaactaaaaaatggggtaaataataataaatctatggcattcaatatttttaaaaaagagattaaattatatgagttgaatgtcctatttggaagtcttaaaatagtgatcttacaaaatcatattgactgcttttacacgcatttaattgctgatgtttatcatttagcatacataaatttaaaagtaaatgcattcagttcattttcagaaatgtaaataaatatgtgagtatcataagaactaatactttttcatatagattctttaaatatccataattaccatttcaaagtacactcattaatatttagaccagaaatcaaattctgaagttgtgattttgttttttctctgataccttctaaaaattacttttcccaactcttaaaattatgtgttctgtatttcaacactcatcacgaaatagatgagaaaattgcaccaatcagccttgattgcagtcgtgagagaaatgataaacagctttcgtgcagcatggcagaaaagcactctggacactatggagcgtcctgtgtgaaatccacgggtccatcctctcaacctaaagataccccattaaattttcaggaaaagtcaatattctcatatgtttggcagaagatcttagtaatgatagctgtctttattgagtacttccctaggaaccttgctaagcacttagctatgtccttgagttaattctctccccacctaaggagcactctgttttgtagctaagaactcagaagcagggaagtggacgaggactttccagaagccaagcagagacagggatggggcccagactcacgtggctgcaaagctcatcccgaatcccgctctattccacgtgctagaagcagtggtgttccgggagcctgtcgcgagtggccgttaagagttctagaacgtgttctccacggatcttcggggtagtcctgtttggataatatcaacactgagaggaagaattcctaaatgattttcctaaagccatgtcaggacaaaactgcaccagagttaaaggcgaagaaggcaagaagaccttattcaagtctattatgataggagagagagagagattcagagattcaactccactgaaacaaaggatgagagggtttctacaagttgggatgggaaggagattagggccatcattgtctgttaattggcctcctgcaaagaaacagagagcttcccccatcttcatgacaggaggtggttgcacagcttagagccaagcacccaccaaggctgggctccatccttccacagggacaggagatgacgccatcttgccagtgatcacattttgaagggacagctcccagctccttgagaaagacagtcctgggttgtacagccagcaagagacttctagaaagattcaggtatcaaatggcagagaaagaacatacaataatacattttctaaagcaaatgctctaaagatagggagttccaggtcccagaggtgggaagaagccgggtcaagtctcagtccagacgaggaaacccaaaggctcagtccagacgaggaaacccaaaggctcagtccagacgtagtaaccggaaggctcagtccagacgaggcaaccggaaggctccgtccagacgaggcaaccggaaggctccgtccagacgaggcaaccggaaggctccgtgcagacgaggcaacccgaaggctccgtgcagacgaggtaaccggaaggctcggtccagacgacgaaacccgaaggctcggtccagacgaggaaacccgatggcctagccagccgctgactgactgttgacggcaagccgctgaccttgaacttcagtgctcagggtttccagtcgtatcaacacactgcgatccacaaggtctgagtgattgtttttaaaggagctacaggaactatctggggaaatgagctatatatgaataattaattttccttttgtagaacttacaacacattctttgtgaggctaaacagtggaaaaacaatcccttgcttgatcaagcagtctcactcctcagaattgaatctaaagaagagtccattacaacactgagttcagaggaatcaaagagctatatgtatgagaatgtttaaggatattccttaaattaatgatatttgaagaataatcaaaagaccattgagaaatattttaaaatcttacaacatattttaagtaattctactataaatttatacagttatatgtacaaattcacattgcatgaaagagaatattaattattgtcctattattaaggttatattaataattattgacatatttttaaaaatcagatgacaaaacatagtaataagtttatcttttaaattccctttattgttgctataattgtttcataataaatataaatagaaaaaatatgtaattttagaatacaaccctttttgtttttttcaggaaagggaacataataagatgatgtcttgcagtcctaggtggggggtgggctttcttcagtcgtgggggtggctggaaatgctgttctggatattgccagagctgaccctgccaggaagccaggtagctgcaaagcagacatcaaatcgacatgtacggcctggctcagcattgccttaggacgtgtgtctttatgaaagcacgtagtgaactcatgtgaatccgggatgtgagccctgcatgctggccactctgtcatgtgaagttatgacaacatttttatcacgattccatttcacagctcaaaagtggaggctctgagagagtgaattgctcaagatcaaacagctaatactgggcaaagaaaggcctcaaattttatctgactccaaaacctggtgttcttctattataatacacagctgcccaaatatagcaagtgataggaaagaaacacaattgacctttgaacaatatgggcttgaactgcgtgggctcatttgtatgccaattgttttctataagtatgttggaaaattttttgaaaacaatttaacaattgtaaaaacctcttaagacaaactgtgtagcttaaaaatatcaaaacattaagaaaaagttagagatgtcgtgaattcatacaatatatgtagatactagtctatttcatcatttactcctgtaaaatataaatcaatcaatttggcaccatctgcagtggagaggaatatagacaaaggtaaagatgcagcgttcaatcattcctgcccatggttaactggagcacatagtgtgacatgggtttctgagtaaaatgtcttaatcatccctgtggaagcaatttctctctccagtaaattgcagagcatggtaacgagtgatctctcagagttcttgtgtaccttccctccttcgtgttgagtccagtaacgtaaaccttgaataacaccccgggacccacacgaagtgccacaagggatgttgcaagtgccccaagaagcgggaatatcacagcattgccaaaaagctgaattgtttgctgtgcaccacagattgaggtctgcagcgtggttgccaccatttcagaccattcatctcataaacagatgatgtaaacttatggtgtcaataaatacagtgcagtgctctaagtatatcttctcttccctgtgattttctcaataacattctctattctctagcttactttcttaattcatttatttatttagagataggatcttgctgtgtcatccaggctggtcttaaattcctgggctccagtgatgcccctgcctcagcctcccaattagttgtgattacaggtgtaagccactgtgcctgaattcacttattctattctaagaatgtagtatattatacgtataacatacagaatatgtgttaattgactgttcatgttattagtaaagcttctgatcaacaatagactactagtagttaagttttaggggagtcaaaagttatgcatgaatcttcaactgcgtgagagttggcgcccctaacccctgggttgttcaaggcccaactataatgagccattcaatgggggatgtgcgttcccacataaatatcttccaaaagtttttctttatcagttttgacatttaagttcagtggataaagagatactttctgcaccataaggtcaatgatgaacatgttgttcttggtttgtgacgtgtaaccctataggttccaggtatcccagctgaaggagacgatccagagggccccagaattaaagtgcagtttctgtactcaaggctcatttagggttagcaacgtatgcacactacacacattcacgtacacacacattcatgttcacatacatttccacacatacacatgttcatgtgtgcacacacattctcatgtgcacacatacacacacacatgttctcacgtgcacacaccacaaggcatttgatgtctggatgatgcacagggataaatgtgcaatgctctccatgatcagagggtcatcctgcagagccatctgcggggccaggagagccagggcatccccccggagagtccagaaggcccacctgagacacaccagtcgtagcttttacctcaaacctgtgcctagagtgcatgtgtcagcatatttcaagtaaaactatttggccaactgctgagttcatgtggattttgggactggaccttgagcgtaagtgtgagtggggactgtccagcttggctggttggcacaagtgaatggagatatctcagaatcatgatgggaagacccagcaggtgggcagctccccttcctttctgctgccatatgcagggctgtgggtgaacaccacattctcattcaggactttggaaaccccagcccaggtgtctccccttgtttcccttcactggggagagactggtgcagcaaaattgatgttggggtgcagcgtcccaggaaggtgtctggtgggggctcttcagggtggatctgtggaccagtaaatgaatgggtgagctgagaactgaggtgggtccagagagagacagacagagacagagagaaggatagagagagacagagaaacagacataaaatagagaaacagaatgacagaaatggagagagagaaagagacacaaagagagacagagacatagaaatggagacagagagagagagagagacagacagagacagagaggtgccagccaggtattgagtgcgcgttcaccatgcacctccatgctgttgacctagtaattgtgacaactgggacccccagtctttctcttctgcccttgataaaatgaatcccgaagtggggtgcaaccttgcagatgggggaaagaagtggggagctccccaggctgctccatgcagcacaggctggcagcatccgaatcgccgagtgattaatagacgtgctgtaagtaacttacatctctgggttaaacgattaaccagaaatggaacaacatcattacatcattccctttgtcaggcctttgggttggcagaatgagctcctgggtggccgggtgccttgtcatgcttcagaggcgttttgggcactcggtcctttatctcaggacaatgaacccgcaaggagaggaagagccagtaattctatagagactcggaggcgcagggggcacgcttagttagagtggtggtggtattttcagtgttttctggttttatgataaacacaagcatcaatgtctcaagactttcatctttatcttttttttttttttcttgagacagggtttccctctgtcacccaggctggagtgcattggtggtgtgatcttggctttctgtaacctcgggcttctgggctcaagccgttctactacctcagcctcccaaatagctagaactacaagcgtgtgctgccacacctggctaatttgttgtattttatttattcatttatttttgtgaagacaaggtcttgccatgttgcccaggctggtctcagactcctgggctcaagcaatccacccaccttagtctcccaaagtgctgggattacaggcgtgagccaccacacccagcttcatctttctcttcaccgtaaaacaggaaagtgtgtggtgaccagtattttaagggaaaggcacttacagagaattaagcatttgacaaaatttatttacagatatttgtctgtggaccacttccgcaccagctgtgcatgagagggctcattgctctgaatttgcctccttgtctgcacccaggagaccgtttcccagatcacgcaaacgctgccttctccccacaccagggccctcagcatgggaatgaccttccagcgctgcacgtttccaatccatgctctgtttttcagttctggctcacagaggactgctggttgcaagcaaacttgtatctgggtcttcaagattttgactttgaggaccagaggccctattgcttcagcatcgtggccggccatgggaagagccatgttttcaacgtggagcttggcagcgagctggccatgtgggagaagtccttccaaagagccacgttcatggaagttcagagaaccggggtaagtgaacaactcacactcttctcacctacacctgctcgggtgtctgagacatagcattggggaatatgtagcagtttatcgggggaaaagaggaatcttcagaaggtgagaatctttcaccggagctactgtgtggaaatgatcgttcgcacggagtcatgcgctccgtggataaatatgagctgtagtggaagggaaggggaggagaggattttgtgtctgtgtctacattgaatgtgaggaacgggctgcatcgctttccaggaagggactccaccgatgtggcgctcaagttcctgagaagtgatgacacttctagcctgtgctccgggagacagaacacctagcttacaaatgagtataatgtgtcgtgcagttacttggatgtttgtaatattttaaggcactttaatggttcttcctctcaaacttgatggtccgaaggagaatataaaacagcttgtgtgtctgaattgcttttctcttcctgacaacagcaaatacatcactcacaaatttgaatgtataccatgtgaagggatgaggaagaatgcattataatcctccttatcctaaatagcgggatgatccttcagggaggatgtgtgctgcaggaatgaagagtgacaggagataaatgaggcagcgcatcccagaggagctctgacttcacaccaaagtccagggctcccgcctggctgagcgcggagaatgctgagtgtgaacttagtaactaaagatggctacttcatttaaatatacatatataccttgaatgtgaaactattctgtgttatttatctttcattcacgttgtcaaaatgtatccaggctccttggcatgccatcacagagcacgaagcttccctgtaactaatgcacactgagatctcttagtccacagaatgaagtcacacccagatcttcatagaaactgatgccaatgtttattctcatttatcccaggctgctgtgattttcccctcaaattgggcaccctaaattggaattatggttgattcctgatgcttaaagtaacctttatatttgaagcatccaattcattaaccattatagaacattacatgctggaaagaaaattactaaacataggatccttcatctcagggacttactcaaatgtatagtggcatttagccacttagaaaccatcagcactaaaggttcaagtcgttaaaaggcaaagtgaaagagcgtttctgggacaaggtgacctttctgcttgttttctttagatgatagcagtaatcattttgctttcaacataaataccggagaagtagagagaattctccattcgcgtgtgtgtgcagggctgccccacaccctctagtgccccagggcccatgcctggctgagcagagtcccggtggccattcagactcatctatgggaaggtgacaggttacaggagaagatatcctgaataagagcaatcatagaattacagtgttggagggagggtgaaaggttagtaatttcatctagtacccagatgtagtgaaatgaatgtctgaagcattctagagggtgaaagtttatttaggattcctaaaaaatagaatttctttatgaatagtccttccttatgtttcgtactgtccttattccactaaagggggtgaagtctgcgcacggtggttcatgcctgtaatcctagcccttctggaggctaagaaaagaggatcccttgagcctcagaattagagaccagcccaggcaaccaagcccaagaaacctagaagccccatctctgcaaaaaataataataaaatattagccaggcatggtagctgatgcctgtagttccagctactcagaaggctgagtggggaggatctcttaggtccaagagtttgaggctgcagtgagctatgatggcaccactgcactccagcctgggccacagagtgagaccctgtctcaaaaaaaaaggtatagggtagggtgggagtggggtcagagctggggttggactttaatggtcaggacatctttcctagaggaagtggttagtctcttttaaaaatcgttggtgtcttgcacaggtggagaagagaaggcattcccagtgggaagcattgaaaaattaggctaatgctccatttggcagaatgaaagatctaagattcaggctaggactcagcaggcagcaatgtgcccaggtgaattttagaggaaacattttcaataatccaggattgagataatgaagacctttcgtggggaatggaggcaatgagggtgttaacaagccggcacacctgcagagactgtaagtgggtgtgggcatccatccacgtttctgcaggactgggtagagtggggctgtgggggccgtgatgaccactgttgggaagaacttctggggccgtgccatgctgcccatgactgacttgccggatcttcacaactcagcaaagtggatgccctcaaagaagccccgggtggatgcttccttgtgcagggtggcaaggtcatgcaagacctctcagggcattgaattcccaatttacgcctcactcaggacctgtgtttcaggaacccaccctgcaggcatttcctgagctccaccccaggtagtgacctgactcctatcagatctgcccatggtgtcctgggagggacaaagcatttcaaaattagatggactcactccctcttcatgaattagagaaaatacttctccaaaactccattacataaactgtaaattattataactcatcatggagtacttataaaattatattacatttagtaatatctgtaaatgaattaagtcaaacgcctaatactctatactaggctggatgcattgcacgtacatcatttaacttttttaatacatctaagatgcagttgttcttttcttttcccttttattttacaaatggtaaatgaaagttcagaagggctatgttacttctccacagtcacctagagactaaaccacaatggcaggatctacgcaagatttcaagaattgctgtcttgagagtcacgttctttctgctgaaacattcagcctcacatgtgacagaaacaaaatagtgagaaggtgcctagaacagtccccggcatacttcaaactctccgtaaatgtgttcttcttgattcagtagcactgctggatttcttttctccaccttctgtctctgttttgcttgttttgctagttttttctactatttcctgactttgatcgtattccaacccgacttgcaattttaaatctccagaataattacatgtgtatagtgttgatagcactgatttttctttactaattgtaacacttttccagcagtgattagcgtgttcattccttctctaaaaggatttctgaaaggaaagccctgcatccttcacaggctctggatctaaactgatgacattccttcacagtcgtttctgaatgcacctatgtgaggtcagtacattttacagaaaagttctccatcatcaggatagtagcttcatgcaagtccttgactgccttatcaacattattactctcttaaataatatctacattacaaatatcgttccaagttatccagaattcagtgtcacacacatgcataagagaataacagaccttccatgttccagcctctccatccctgcctcccaagctgaggtacaaatgccaatattatgttatataatcttcaaactgtttttacacatactcaagtatattttttcctttttattgaaaagtcatcacatatgcatgttgttctgcaatttacaagacttttgtacattttcatgtcaatttatctaaatttgtatgtcaatttatttaaattctaacaggacattgcaatgtcctgttagaatttaaaattaaaaatgtatatctttcctaatagcaacacaaaaacacaaagtataaaatatctatcagataggatgcctttggctacaagtaagagaaagttcttgactcacccaacaataaacaatacctattgttgctattattttccataacaaggtttccatactccaccttgctgagttttgaggtctagattgtgcctcggtgtggctcccctcccagtcataagatgcttgtggaagcaacaagcattcatgtcggtgttcaggggaggcagaaaatggcctccataacccattgaggatgtccccttcagcctagctgtgccagcctaggtcatgagcccatcagaccaaagtactcgtctagggaatgccattggctgattggcttctcatcaagggaacaccattggctaattggcttctcatcaagggaatgccattggctgattggcttctcgtcaaggaaacaccattggctgattggcttctcgtcaagggaacgctattggatgattggcttctgtgaaccaacatccaccctggggactggaaatgaagtcagcaacggtcccaacctttatggtgccagggaccggttttgtgaatgacagtttttccacggacagggccagggggatggtttggggatgattcaagcacattacatttattgtgcactttatttctattattattacattgcaatctgtaatgaaataattatacaacccgccataatgcagaatcagtgaggtccctgagtttgtgttcctgcaactagacggtcccatctggggggatgggagacagtgaaagatcctcaggcattaggttctcataaggagtgtgccaccgagatccctcacaggtgcagttcacaatagggttcccgctcctgtgagaatctaatacttctgctcatctgacaggaggcagaggtcaggtggtaatgctcactaacccagctcctgctgtgaggcccagttcctaacaggccacagactggtactggtaaaaaaaaaaaaaaaaaaaaaaggattctgttaggacatcccaggagcaggtgtagaaaggacatcccaggaaacaggtacagaaaggacaccccagggaacaggtgtagaaaggatatcccagggagcaggtgtagaaaggacaccccagggaacaggtgtagaaaggacaccccagggaaaaagtgtagaaaggacatcccagggagcgggtgtagaaaggacaccccagggagcgggtgcagaaaggacaccccagggagcgggtgcagaaaggacaccccagggagcgggtgcagaaaggacaccccagggagcgggtgcagaaaggacaccccagggagcgggtgcagaaagggcatcccagggaagaggtgtagaaaggacatcccacggagaaggtgcagaactggaggacaacagtgtctcctgcggtgcctgaacaaaaagcattctcatcaaattcagctttctcctttgcaagacagtttcacgagatcacgtttatgaaattttcctaggtctgtgtgtgctatacggatgcgcaccatcaccatcaccgcgcagtgggtctcctgttagaggagccggtcacgcacggtgctccgtggattttccactgccaagtcctgacgagcacgcccctgcctgcccgcctcggggaacgggacctcactgaggcaaaccaagctgtcatccttccacacagctcccttggtaggagcattctccctaatgggcccgtctttccctcctgctccatttctggacttaggtttgctctctggtctgagctgctctcacagaacaccaatctcttctgcctgtttccaagtttcagaaatttttctgataatttctcctttttgtttataaagactccccaaagactattcttgttcacacacaggttaatattctggtattagtagttgcttgatatcaggtgcaacagaattttaagcaaatcaaggtggctctgtgattcattaatgcctttaccactcctaccgtactatcaagacaagcacagccaaaaagagattctgtgtatggcagatgtgcaaaggcaattcagtggagaaaggaaagccttctggacaaattatgctgggataattggatgcctatatacgaaaaaaagaactttgactcattatatacataaatattatatatatatatataagtataaactcaaaatgaatatagaatgaaatataagtacaaaactataaaacttttagaagaataaacagcataaagtctttgtgacctctggttatgcaaatatttctcagatacaaaaccagaagcacaaaccatgaaaaaaaattgataatttagacttgcaattaaaagcaactattatttgaaaaacactgctaatataatgaagagaagatatgaaaactgggagaaaatatttgcaaggcatataactggcaaaggacttctatatgtaatgcataaaaagatctcaaagctcaatgattagaaaaacaataagaaatttgggaaaaggcttgaataaacacttcaaaaaagatttctagatgggaaataggtaggttgaaatatgctccaaatcattagcatgtagggaagtgcaaattaaaacagtgaaatctcacagcacacatattagaatgagtaaattttaaaagactgatgatgccaagtgttggtgaaggaactggaactctcattcactgttggtggctgtggaaaatggcacacccagcttgacagtgtcttaaatgtaaagacaaattcgccacaagatccagaaactttctcgttaccctggtgtatgcaaaaatgctcataacagcttcatttgtaaacaacaataactaaaaacagcccaaatggtcactgatgtaggaatctatcaaaaatgtgtgtgtatctatataaaggagtggaattcatcaacagaaagaatgaattattggcatatgcaatgatgtggaacactctccaagcaacaagagtacattctgtctaatttccagagcaatagtttaattttaatgaggtccacttcattgagtttttctttcacggattgtgtttttggtgtcacacctaagaacttacccttccaccctcgatcaggatgattctgccctggattttgttctaagaactcaccattctgccctcgatcaggatgattctgccctggattttgttctaagaactcaccattctgccctcgatcaggacgtttctgcctggattttgttgtaggagcatgaccattgcacattcacatttgtcactggtgtggtaatgtgtgccaaggtagatggaaggggaatcggcctggctgctgggcccctgcacaaaggctcagtgggagagtcttagtttatttagtgttgctgtaacagaatagctgaggctaggtaatttataaaggaaaaagggcttatttagctcatagttctgcaggctgggaagttcaagtgcatggcactggcttctgaccagagctttcctgctgagtcctaacatgcagtagatcaaagaggaagccgacatgtgcaaaggggccaaatatgaagtgtgtcctggctttacgacagcctatccttgtaaaaactaattcattcctgaaaaatctcatccagtctccagagagggagaactctctcactacctagagaatggcagcaagccacccaccagggcggagccatcatgacccaaatgccctgcattagtccccacctcttaaaggctccacctcccaacatccttacctcggcaactacagactcagcttgttttattgtgctttgctttgttaagctctgaagatactctttttattatttatttttaattgaagatttaaggaaaccctgcagtaagcaaatctatcactgccatttttccagcagtctgtgctctgtcatgtctccatgtctctgtcacattgtgggaattcttgcagtatttccaatgttttcattatcactatatctgtcaccgtgatatgtgttcagtttttgttgttactgttgtaattggtttcaggcaccaccagtgttgctcatataacatgacaaacttaatcagtcactgctatgtgtgttctgattgctccactgaccagtcgttttctcatctctcttcctctccctgggcctcctcattccacgagacataacagtattgatattaggccagttaacaaccctggaatggccttgaagtgttcaaatgaaaggaagagtcacatgtctctcactttaaatcaaaagctagaaatgattaagctttgtgaggaacacatgtcaaaagccaggacaggtcaaaaccttcttgtgccaaatagccaaattgtgaatgtaaaggaaaagctcttgaaggaaattaaaagtgctactccagtgaactcatgaataataagaaagcaaaacagccatactgctgctacgaagaaagttctgaacaagatcaacgtgctgaataagaacaaaccagccacaatactcctttaagccaaagcctaatccagaacaaggccctagctctcttcaattctatgaaggcttagagaagggaggaagctgcagaagaaaaactggaagctagcagaggtgggttcatgaagtttaaggaaagaatctgtctccaaaacactgaagtgcaaagtgaagcagcaagtgctgatcaagaagctgcagcaagttctccagaagatccagctaacaacactgataaaggaggctacactaaacaatagattttccatgtagacgaaacagcattctattggaagaagatgccatctaggaatttctgagctggacaaacgtcattgcctgacttcaaagcaccaaaggacaggctgactctcttattagggtccaatgtatatggagactttaagttgaagtgaagcttcatttaccattctgaaaagactagggccctaaagaatgatgctaaatctactctgcctgtgctctataaataaaaccacaaagcctggatgacagcacatctgttgacagcatggtttagtaaatattttaagcccactgttgagacctactgctcagaaaaaaagattcctttcaaaatattacaactcattgacaatgcaattggtcactcaggagctcttgtggagatgtccaagattaatgttgttttcatgcctgataatacaacatccactctacaggtcacaagtcaaggactaattttgactgtcgagttttattatttaagaaatacatctcataaggttatagctgccatagatagtgaaccctctgatgagcaagtaaactgaaaacctggaaaggattcaccaccctagatttcattagaaacatttgtgactcatgggaggacatcagagtatcaacattagcaggagtttggaagaagctgattccaaacctcatgaatgactttgagggattcaagacttcagtggaggaagtcactgcaaattgatagaaatagcaagaggacaaaaataaaagtgaaggctgaagatgattgaattgctgcaatctcaggataaacttagaacagatgaggagttactcttatggataagcaaagaaagtggtttcttgagatggaatctactcctggtaaagattgtattaatattgctgaaatgataaaaaacatttagaatattccataaagttagctgataaagtagcagcagggtttgagagaattagcttcaattttgaaagaagttctaccatggataaaattctatcaaacagcatcacatgctacagagaaagttttcatgaaaagaagagtaaatcgatgaggcagacttcattgttgtcttatcttaagaaactaccacagccgctccaaccttcagcagccaccatccgcatcagtcagcagccatcaacatccaggcaaggtcctccctctgctaaaagaggaagactcactgaaggctcagatgaccactaggttattttaacaataaagtatgtttaaattaaggtgtgtatattacttcttagacataatgctttgcatacttcatagattacagtatagtgtaagcccaatttttatatgcacccagaaaccaaaaaattagtaagactttttgctttattgtgacatttgctttattgcagtggtctagaaccaaacctatgctatctccaaagtcagcctgtgaatttcaacatgagttttggttgggataaaccacatccaaaccatagcagggagtcaggcttttccacgtgatgccagggaagaggcagctggtgacatgcaagctgggcacctgcaggaggtttttgtgcagggctatgcaggggaggagggaagacagcccagtggctcctcagagggcagcaggggcacagcctcatagacaagctccatggagatcccaccggaagtgtccggccccactccagggtctccatgtcagtggggtttccatcctctctggaaaggcggggaagataacgcttttctggttttccaatgagtagcattctctctgacacttcgtggcaagtattaacttcaccacattactaaaatggtgattatttcatttatcaaatgtcatcagttaatcggtaaaattttcttataactgggacatctctttcggttccaagcaaatctggaactactttttggtgaataagtttcacggtataacatgcacttcacctgcttaatcacagtacacaagtaacctcattttgggacaactcaatcaagtaactggccatgtcagttaatgcaacatattgtttatggagggcagaaggtgttagtgaggtgtgttgttacctgaccatgtcagttaccgcaccaggttgctgtttatggagggtacgaggtgctaatgacgtatgttgttatctgaccatatcagttactgcaccaggttgctgtttatggagggcaccaggtgctagtgaggtctgctgttacctgaccatgtcagttactgcaccatgctattgtttatggaggacaggaggtgctagtgaggtatgttgttacctgaccatctgctaagttcttttatttaaaaaaattttagattccttacgcatcttacaagcctcaattctgtttttcttgctgcttcctgtagtaggcctccctgcagacttcatggccatttctagtgcagtggtagtcaagaaaagaaataccaatgcttctttctcttttgtcagaacgaagagcaaagaaaacccaagtgaagatgtaaagcctgtttatgtaagtgtgacatacagtagtctcctttcaattctgttttgctttctgaggtttcagttacccgtggtcaaacgtggtccaaagatattaagtgaaaaattccataaatgaataattcctaagttttaaattgcacatcattctgagtactgtgatgaatctcgtgccaccctgctgcatccccccgggacgcgaatcacccctgtcagtgcgcgaatcacccctgtcagtgcataacaccctgtcagcgcgcgaatcacccctctgtcagtgcgtgaataaccgctgtctgtgcgtgaatcaccccctgtcagtgcgcgattcacccctctgtcagtgcgcgaatgacccctctgtcagtgcgcgaatcacccctgtcagcgcgcgaatcacccgtcagtgcgcgaatcacccctctgtcagtgcatccaggctgcacaccacccagtagtcacttagcaacggtctctttgatcagattgactcttacagcgttgcagtgcttgtattcaagtcactcttatcggatgtagtcatgtcacataagggctactgaagtgcaagagcagtgatgctggtatacagtaataattgttttattattcatttctattactaatctcttactgcacctaattcacaagttaaactttattgcaggtatgcatgtatgtaggaagaaacatcgtatagagcacagatagggttccttacctccatgctttcagccattccctaagggtctcggaatgtaacctccttggaggagcgggggctcccgtacaggaattaaggttttgtgtgggggctgttttggtctttctgaaggctattgcttatatcatttttcatgtggtttgtgctgtttttttgtaaccagaaaagttttctttcatttgctatatctgtaccgcatctctgatgtgctgcgtgctttttgcgatgttttcagatgggaagttggctggagtaggtgcttttctccagcggtcagtcaggcatccacctaacccagggtgaccctctcaggattccaggaccgctatttctgggcattgcagttaacatccagctgcgaagcaaagtcttttctgagcaccatagctagatacattgtatatgagagagactgatgcacatgctgcctttttaaaattcataagtggctgggaagatcgttttgaataagtcactgaaccttcctaagaattggtgtacttatttctaacatgattactgtatctttgcgtgatattataaaacttaattaattgatgtttataaagcacttcacatggaaatatgcaaaacataattttcttacaagcttaaattaattttctagataaattttcaaaaaaatcttttttgaattatttaaaaaaccactattgttaatgagtttgaaatatgatatagaataatactacaaatgtatttttgtttctcctgaaaaaaatcaagagaacctaagagaaagtcaggtgaaatattgaataacattagattagagtagatttatggggtcattaaaagacaattatttgttaccagaacctccagtttaattacacaattaagttttagattgtcttcattatgtacatgaaccttatcacaattctaatttacctcatctctttcagagctggttcagcagccagctttattttaagttaaaaccaccaagataattgtgtggcttctgttgatgactcttaaatgtttcgttttccttaaatacacaacagttgcacaaatggcctgggaagggactggccttggggggacccacttgattccttttgagcttctccagctcctctcaggagaagcaccaaggtcagaggctcctgggactcctcaccattttggagcctcatccaaatttatgttaaaattcagcttttccttaaaattgttattcattcgcttaaatcctctctgtagtgtattctcagccactgaagcaaattacgaattacaataaattcacaagtgacctcatattaaagttattgaatgcattcatttacaaactttctgaaagtatctaactgatgcctattattctactgctagtgctttgcttttaataagtgtattgtgtaattatagaaactttatataaagtttgtcaaatccgataattactagtttgcatattcaaactcagatattcacaaatgaagttatatgctgctgctgtgcacgtggacacgtagctagctattcaggctcatgggaaaggcctactggcccttatctaacatcggtgcccactttactccaagtagttttttattcagttgtgcttgtcgcggggtcaagtgtcttaggggtgagtgtgataaatgctgaagggtcttgaaactgggaattcatgagtggataaaaccaacactcactctcccgtcttggaggctgggtaactgtgtgtgttctgtggtctgtggtggtgtgtgtatgtggtgtgtggtgtgtgtgtgtttgtgtttatgtggtgtggtgtgtggtgtgtgtgtggtggtatgtgtgtgcttgtgtatttggtgtttatggtgtatatggtgtgtggtgtgtgtgtttgtgtggtgtgtgtgtgtggtggtatgtgtgtgcttgtgtatttggtgtttatggtgtatgtggtgtgtggtgtgtgtttatgtggtgtgttgtgtgtgtgtgtgtggtgtggtgtgtgtgtggtggtatgtgtgtgcttgtgtatttggtgtttatggtgtatatggtgtgtggtgtgtgtttatgtggtgtgttgtgtggtgtgtgtgtttggtgtggtgtgtgtgtatgtggtgtgtgtgtgcacaagtgtgcatccattatcacagtgtacattgcaggacacgtgtcccggacagcagaacacgtccccagagtacctgttaacctggcacttgctttgctgccagccatggctgtgatgaaggtgaaggtatgttccctgtcactcaagcctctgcatttagtaaaaagcaaattgcacctcaggagacagcactggaaatggtgatttagttcacagacaggggacccttgccctgcctgaacatttgtggaagcggacactggccccacccagcacaagcaccccacacatctgtggagggaggcgggcagcatcagccactgcacccccgtccgtgtctcctcaagcccgggaggaggtggatgggctcacggccgagccttgtgaccttgctaccacttctggcattgtttctataggaaaatctcctgactctgaaaatctggcttgcatataaacatccagccttatagcctgcctggagctgtcagttttgcattatcaaaaccgtaataaatattaagatcatatggatgtgttttaaacgtgtgcccaccttacttattggctttggtatgactacagtaatgtccttcccgtggctctttttccagacacctggagtgagtgtgggattctcttccgcagcgaagtgaattgcacttgtaggggagtagtttacgtgcaccgccgagtttctccaaatataaaagcccattttcattccatactactagcacaatataaatactatatccaccattgtcttgtgagcccttagatgaagttaatttcttccttttggaatttattttgcatttattattcataaacttacctaaattctttcagctgaaaacatcgttgatcaaagaaacgctactgcatgctttggaagtcagaaatgcacccaacacattcagaaggcccagcttcaggctgggctgagtggcatctgtgctggatgctttttaattataatccccaaaattctaccaaacaggggaatccagaggcagtatctgcaaggtcccgccaagcatcactcacaataacgccgcctcccccgcacagcgcgtccctccgggaactccccccgcccccacgtcagtgagctgggcgctctccaagggctgcctcccccgcactgtgcatccctccaggatcacccccgcccacccccgcccccacgtcagtgagctgggcgctctccaagtcctgcttcagtccctgtctcgtggctttgactgatacgataagtagagcgctggcatttcctgatggtcccaacacgtcggcctacgaaagccagatgagctccctttgctcacacagatgccgtttgctacagagaacctgcacatctattttctaaattaagatcaaaaatagccaaaaggcacaaaatacagatatcaagacagaagtggccacggaaggtgagtagctaagctcagaggatcccagcctctggattttcagtcttccatgcaccgcccacacctagaaggaaaattccttctccagggtttgcagagcctggctgcagccatggacaaagccgccgtggcctgctccttccgggaaaggcaggtgaactgtggcctcctgctactgctgccgcccacgccctaactcctcagccgcatccctgcaccaggctggtggtcaccctccgaagtcacctctcaccaatcttcttggcctgacccctgctgggcccgtgcacacccagacccctgccaatccggctgcttgggaccggggtgcccacccctttgcctccctttggccaacatggaggcttctcagccccgtggcccttgtgctcatcagcactgacagtcccttggctgtaaggtgtctcttgtccactgcccagttacaaattagtcaacggagctgctgtgcacctgcagggcatccagagctgcctggacagggcccacagtcccctccttcccagacctgccaggcttgtctgaggaccgactgtgtccaggacaccgttcaccctgtctgcccctggggctttctgtcccacaccctgcatcccagcctggatgccctctcctcaccacagcctgtgtgtggccctggcttctctgtgtcttccacagttctctgtggacctccctctcgcatgggacgtcctcgggaccatcacacagtaggtatgcccggtcattcgtatcctgctcctgcagaagctcagcaactgtggaggcggcttttcctgaattaaagcgagtcttgggcatggataactacctggggaataaacagttaaagagcccgctgtcttctttacctatccaaatataaaatagagctgctgagagaaacagggctagaacattggtgctgcactgtggctgggaattatgtttgacagctttaaactgagtacctcacggtagatatttgaaagtccccgcagtgagccgccgacctgccgttgtgaagaatgatcctgagtattgctcttggtgcctgtgagctcctgtgaatctcccccggaaagatgctggagtagggagcgggctgcagctggcaatttatttctccaaaagccattatggcttaatttaattcgattggaactaagagcgctggtggtaatgtttctatttctgctccgtcattcatttcagggctaatctaatccttcagttaacacctccatcctgggaagagcatggccaaattagcttttattaattgtttacattgtaacgttccctctctctccaacttttagctgttcagattctggcgggtgctgataggaaggcggcagccagttgaacctggaaatgtgtgagaaccacaagtccagcatttttctgggatgcgagctcggtgatggcagggagattctgtcttgtttttctttggaaccccagagtctccaacgtatcacagtcaagcacccctcgaaaaacttacaaaaccacccaaaaagagaatatatttctcaccatctactttcctttgatggagacgccaaaccaattgtttttttagtttgcatatggggccctaaaggatgtcatgttttctctgagtaaggcaagattaaattggccttatcttttaaaatttcacttaaacatatgtttatacaaaacaagtagaaagttaaagctgacgtcaactaaatcaccaattctaaatactggaaccatattatatttctaaaatagacatttgtgtttgtaattaaaatattcagttttgtttattaatgacaaacatttattgcacataggctgtgtgtcaggttgtaggaaaccatatacttactgtattagtcagggttctctacagggacacaataggagatctatctatctatctcatattagttttacaactctatataaatataaatataactatataaatatatatatgtatatatgggagtttattaactcacacgatcacaagaccccacagtaggccatccccaagctgaggagcaaggaagccagtccgagtcccaaagctgaagagcatgaagtcccatgttcaagggcaggaagcatccagcacaggagaaagatgtaggctgggaggctaggccaatctagacttttcatgtttttctgcctggtttatatttgctggcagctgattagatggtgcccacccagattaagggtgggtctgcctttcccagcccactgactcaaatgttaatctcctttgccaacaccctcatagaaacattcaggatcaatattttgcatccttcaatccaatcaagttgacactcagtattaaccaccataagtccaccccttgtcaacttgaacccatatacatctcctgagattatacataatcttcaaataaagacaatcatgtcataattacacctaacataatacaactttccttggtaggactggaaacgcaccaatccccaacccaaatactatcacacaaagttaacaatacttaaatgctgacatgaaggcaataaatctaatgtcacatgataaaggaaaaagaaataaaatgaagatattttcttagtacaagtgtatacatgcacaagtatgtttttaacaaaagaaggaggaaatgctcatgacaattacaatccccatttctgcatctggtcacatggtcatagctggtattaatgacttccttcttctaatacccattctgtactccttttgccttcagcaagcacctcagcaggtcgtgtttttttttcctgatggaaagacccaaaccttcattcctgaagggtctggaccatttgtagtcctgcctggattgggctgttgtggtttcccattgaccttaatcatagggcatggtaataccaagaaatgcctgaatggagctcctgcattccttgcgtactcttccttacctctgttgtggagtagtagactgatttcatcttgatactccaggtcaatcgccccagccaacactgtaactcctctcttagcctcttgacttaaagttaggagaagcccaaagtgtccaggtggcaatcttaacttccagtttaatggaattgtccttgtgtttcctggtggcagggttcctccttctggaactaagacctctaggacagcagaacataatgtcgagggaactggaaacagaaattttgctaggggatcactaggggtgatagtgagtggtgccacttcctcttccaccccttgattcttggacccgtgaatcctggctatgagaaaaacagtaccatatatcaaatgctgattcagagcatacatggtcttctggagaactttgccccttccctgcaaagtattgtcacctagttggcattgtgacttcaaaaggccattccaccattctgtcaatccagctgtttccagctgatggggaacatggtaagaccagtgaattccatgagcatgagcctactgccacactttttcagccataaagtgagtgccttggtcagaggcaatgctgtgtggaacaccatgacagtggataaggtattctgtgagtccacggatggtagtcttggcagaagcattgcatgcaggataggcaaacccatatttagagtaagtgtccattccagtgaggacaaacctctgccctttccatgatggaagaggtccaatataatcaacctgccaccagggagctggcagatcaccccgaggaatggtgccatattgagggctcagtgttggtctctgctgtgagcagattgcacagacacacccaggatcaacactttgcatccttcaatccaatcgaattgacactcaatattaaccatcacacttgctctgaagaacattcgtcaacaggttacctgagtgtcactgtggctgtcatgacttgctcactgaaggaggcagacatgctcctgtgcacttcctcggcaggctcttcactctttcagaatgagggggctggtgagaccaggtgtgttctccaggtggacacacagctcagagacaaagcttgcagaagggcaggcgtgtttggaaggaactctgggttggggaggagaatatctttgctcactctgtgcttttcccgccgaggagtcacagctgagtcacctgcccctcattcttcattccttccttctgtctaaacaatgagtgattgttatccacatttaaggaatgttggaaagacttaaaaattgtgaaaacttttgaacaatttaatttctttagagaaaagctgataattggaaatagaaatagtccaacaggaggcaccagggcctctgtggatgcagcgggtgctcctttgtctgagccaacctcgagtgaagttggaggctgggtgagtccggcagcctttccttctcacctcacctctgtgctgctctgactggtttctaaacgtgttcaccacgtgtcttgttcatggggaagctgaactgtgaacatgcccctttattcgagaaatgagccccagcccacacattgcttggtgctgcatctggttgagcaggggtggagaatagcagcagggggcccggagtgctccgtgcaggtggcagagtgacggcggaacgtgctcctgatggtgacgctgaacgaggaaaccctgaatagcatgcgccagacagcgagcactcgtcattctcattggagggccggggccacaggaacaacttcacgcgctgacagcgtgacctgttgttttcaccctctggccaccgctgaagagtctgccgtcatgaaaagggcccaagcagcatttccacttgaaaataagatgcgtccttttccatccatggttttgtggttgcattaatggaaggagaagccttcccagctgttgactttaagacccgagaatgaccacctcactcacgcattccacacagcatcgtgatggacagcctggacccggggtggagcacctggggcgagcccagcttccatcctgaccacctggaacctcggacaagtttttaagaagtcctttgcctcagttttcttctctagaaaataggataatagaattaatcccctagagttgttttgatatttatgagtgattggtatttatacagcttaagatggtgcctggcacatggtaaatgccatccaacttggctatttttactcagcaagtgttttttgggcggcacttatgttctaggccttggagaacctacagtgaacaaaacagacaattctctgtgcacagatctgacatcatatctagaccactcagagcaatgtgtttctggttgtctcatttctgctacttttcatcaggcacaaggtctgagatccagcaaacaccatgtaaatctctgaaggtctgaagaagaaatttgtatcgccaaaaacataaatttaactaagttaatggtgctcagctatcctccaagatggtccacttcccaagctcaccgacaagctacaaacacaccacacccacgcattcacacacagaggcatatacatggacatgtgcacacatgacacacacatgcattcacgtgcacacaggcccatgcatgcaggtatgcacatatacatgaacacacatacataagcatacatacacatgggcacagcacacacatgaagatacatacatacatttttgtgcaccctcacagttatgcatatgcacttatatgtatgcccacacacatgcagaccaaggaaaatgtgtgtaaacatgacacacctcacacacatgtacacatgcacactcatgcacattcatgcaggcatgtattcacacatgctcatgccacacccacttttgtgtacacacttacacctatgcacacacatgcagcctttcccctgcctactcttccatctcccccagcccctgcatttgcaggtcatccccagccacacaaatctgacttcagatttctggtctactcttacgcctgattcctttcagccttggcctttgagattgttgattactgctccttaattagcctctattccacgatcatcttgatcattttctgattttctcacggctgtcctctgctctctgccatcatctctgcttggcttgaaactcaagtgttggcatcacctctagcatctttacttcctgccactagcattatcttcagagatcctaatcaatatcacacccttagatattccaaattagcaatgatgccaatctttacttgtctgcagctcattctggaacctcagacccacatccccaggtgactggggtcctgttctcaccttcaaaatgtctccttctgccgccgcccttccctcatctttcctggggcactgggtgctgcgtgcactcagcaggagcctgctcagtctactcactgcccgcatgtgtctctccacaatttctctgactgccccttcctccgtctcactcctgccacctgctctgtgtctatcacttggcagatcgtaccctggaagcccatggcacactttgtgcactgtaggcagcacttagcaaacactgacatccgtgtttgctttgcgtgaactcgtgcctatttgcacagaaaatagtcacgggccatactcaaacctgtagccatgtttggagtaggacccttattttaaaaatgtggtgaaatatacatcacataaaacgtaacactttaaagtatacagtgcacagtcattgaggacattcacagtggtgttcagctgtcaccaccatcaccagaaccctgtcatcttgcaaagccgaagctccattgccactaaacaccagctccccgtgctccaaccccagcccatggtagccactattccactccccgtctctatgaatctgaggactgcagatatttcgtatgagcagactcgtgcagtgtccgtctgtttgtgcctgacttatttaacttagcataatgttttcaaggtcatccctgttgtagcatgtcagaatttccttcctttctaaaggcgagtaatattccattgtatggatataacattttgtttatccgttcatcctttgatggacacttgagttgtttctacctttgggctgctgggaataatgttgctataaaaatggtgtattagtccattctcacattgctataaagaactacctgaggttaggttatttatgaagaaaagtggtttaattgactcacagttccacaggctgtacaggaggcatggttggggagacctcaggaaacttacaatcatggcagaaggcaaaagggaagaaagctgtcttcacatggtggagagggacagagagggagcatgaaggggaagttctacatcctttttttttttttttgagatgaactttcactctctcacccaatctggagtgaagtggcatgatcttggcttactgcaacctccggctcccaggttccagcaattcttctacctcagcctcctgagtagctgggattatagacatgcaccaccacacccagctaatttatgtatttttagtagagacggggttttgccatgttgtccagactggtcttgagctcctgacccaagcaatccacccaccttggcctcccaaagtgctgggattacaggtgtgagccactgcacccagctgagaagtactgcacacctttaaacaaccagatctcatgagaactctatcacaagacagcactaggaggatggtgctaaatcattagaaaccacccccatgatccagtcacccaccaggccttaactccaacagtgggaaatgcaatacatcagattctggtgtggacacagagccaaaccatatcaatgggtgtacaaatcatcttgtaatgtctctgctttcagttattctgggtgtatacacaaaagtgggattgttggatcatgtggcagttcaatttttaaattataaggagttactgtactgttttccataacattacaaaattttacattcctagcaatagtacacaagggttctaatttcttcatagcctcatcatcacttgttattttctgttgtatttgcttgtttgtattttatagtagccatcctagcaggtgtgaggtggcatctcactgaggtttgatttttgtttctctaatcactggtgatgttggcatctttccacgtgctgatgggtcattgatatatcttcttggagtaatgtctattcaggtcttttgcccgtcttttaattgggttgtttgcttgttttcttctggttcagttgtaggagttcttatgtattctagacatcaaccccttaatagatatatgatttacaaactttcacattctctgggttggatttccactctttggtggtgtcctctgatacacaaaagttttaattttggtattattctgtttgtctatttttttggttgcctgtgtttttggtgtcatatccaagaaatcattgccaagtccagtgtcatgcagtattccccctatttttaatcacaagaattttacaattttagctgtgacatttagagttttggtctgttttgatttaattttgggatatgatgtaagataagggttccacttcatttttgcaaatggatatccagttttcccagcaccatttattgaaaagactggcctttctccattgaatggtcttgacaactttgttaggaattatctgagcacctatgtgagggtttctttcatcgctctctgttctgttccattgatctatgtctttctttatgccagtgcaacattgttttgattaatgtagctttgcagtaagttttgaaatcagggattgtgaaatctccaacttgtttttaagattgttttggctattcaaggtccttgacattccataggaattttaagatggatttttctatttctggaaaaaggtctttgggattttgataatgactgcattgaatttgcagatagctttgagtggtatggacatccgaacatcattaagtctaacaatccatgagcacaagatgtcttttcttcaatggtgtgttctttaatttttgtcatcaatgttttgtagttttcaatgtacaagtctttttgcttccttggcttagttaattccatatattttattctttttgatgctattgtaaatgagattgttttctcaatatccttttcaggttgttcgttgttagcatatagaaataaaactgatttttgagtgttaattttgaatcctgcaacttttttgtgcaggatttgcttaattcgtgtattcattctaacagatttttttttgttctgtctttagggttttctatatgtaagaaagtgttgcttgtgaacaatgataattttgttttttctttcctatttggttgacttgtttgtttttcttcacagttgctgtagctcggatgtctagtattgtgtggaatataattggcagcagtaggcatccttgccttgttcctgatcttaaagaaaaagctttcagtctttcactattgagtatgatgttaatgtgggcttttatataaggcctttatgatgttgagatatttcacccaatttctagtttgttgggtgttttatatcataaaagggtgttgaattttgccagttacttttttgcatctattaagatgatacagatttttctttttccttccttttgttcacatggcatgttgcattgatagatttttctatgtcaaaccatcctttcattccagggataaatcttactttgttacattgtacaatgcttttaatgtgctgttgaattttgtttactagtattttgttgagatttttgcatcaatcttcataggggatattggtctgcagttttcttttcctgtagaatccttgtctgggtttggtatcaaggtaacactgacctcatagaatgactgggaaagtatatccttctcttcaggtttttagaagtgtttgagaaggattggtgttaattcttctttaaatgtttggtagaattcaccagcgaaactatctggcccttggcttttctttgctttaaggtttttgattataggttcagtcccattgcaagctacagtttgttcacattttctatttcttcttgatttagttttgataaattgtgtgtgtcacacgaattttttcattgaatccaagttattcaatttgttagtgtaaaattgtttgtagtactctgttacttttttttttttttttttacttttgttaagtcagtagaaatgtcccctctctgatttctgattttagctatttgaatcttctctatgttttatttggtcaatacagataaagcattgccattttaaaaaatatttttgaagaatcaagttttgcatccattgattttctatattgtttttctattttgtctttttaaaaatttcttctttaatctttattatttccttccttcttctagatttgcgtttagcgtgtttttcttttttctagtttcttaaggttaaaagttaagatgccaatttgagatctttctttttttaatataagcatttttagctataagtttcccttttggccctagttttactgtgttgtgtgaattctggtgtgttgtgttttttatttaggttattttctagcttcccttgtgatttcttccttgacccattggttgtgtaagaatgggttgtttaagttgcacatatttgctgattttcattttccttctgctgttgatttctagttacattccaataagttcaaaaaaaaaagataattgatagaattttaatcttttaacattttttaaggcttgttttgcggccgagcatgtggagcgaaccttgtaaagtatgatatctacatgggagaagtgaccctctggcaggcttccttttgtgcacttactaggagttaaaaggaccagcttggaagactgctttgatgctgtaatagtgccatttggttgatccgaaactggaacccagaacagtcctctaagcctgtggactaagaacattcaagatgttcctgaacagcccaacgctggggtccaagtcagacggtgccacatgtgttcaggctggtcaccaccatagcctcttagctgaccactctcttccccaactctcttttgtctccaccactctgcatacccctgcaatctcaccctctccagatcgtctgtccctgaagtcctcagtggctcctattttttggaggagatggaatggtatgctgaacaactcccacgcatggggacactggggacagaccccatccttcaggtcccattggggacagaccccaaccctcagatcccattagggacagaccccaaccctcaggtcccattagggacagaccccaaccctcaggtcctggccatgcccctcccatgcccaaggaatgcagctttgagaatttcatctaatctctctaaacatggtacattttatgtgctcaaatgtttgagaaatgaatgaatttataagagaaacttagattctttatctgaaaaacagagatttagctttcttaggagaaagtagatgagtttctagaatgattaccttagagggacagatgatccaatttatatttaaaaagtagaaactggttaagattaaagaaatctccaatcagaaatgcagaaaggaactcactctctgctacttcttcatgtaaaggggttcatcatccatcttgtaagcaggacattggtctcccaaaccacatggacacaagcactttctgtcaatggtaaacggtcatttcaggaatcagatattaacatatgatgagaaattattgaacaaaatatcttagcatcttaagaaacacaaacctaagtcctcaggtatatgagggaagtgagtgtcatcgtttgctttataaataacacagtgtctggaggaagaaatcaagcctgcagaatcataaaaccactcgctaacataacactctacagtttacagcccaggcacccagaggcgaggaagtagacagtgtggctcgtcttctgacctggctccctctgggatgaggcgtttgacgcaggctgtctcgttcactcccgctgcgctgagtgtgaaggatccagctctgccctgtgcgcatggagtgctggggagatgatgatgctggggaatgactgagtgggcagtgtcagagtctctctctcatgctagggtggtgccgcagggactctcgtgtggccatgagctctgtggcaactctgagtttcagtgttttgaactctcagatgcagagactgaagcggccacatgctgggcggatgtagtgtctcatgcctcagtgtgaggagcctgcatggagacaggcttgaggatccgcctcctgtcttctccccgttcactctgagggaactctcttcccagaataattttttccaacaggtgctgaaacttgtatagggagagtaccttttttaatacaaagtatccgcttcagtaagttacccattttagtaacttcagtgtttcttagttttaaccctattcccagaggcatctattataataatacagagaaagtgtagcccagaaatgtaatgattgaggaaatttcgagtgacataggaatgacagccgtagaggactgagtctccaatgtttgggtgggaggggcaggcaggtgtcaccatcaatggcttccactgtagaaggctgagtctcccatgttggggtacgagggtcaggcaggtgtctccatcgatgatttccactgtagaaggctgagtctcccgtattggggagggaggagcaggcagacgtcaccatcgatggcttccactgtagaaggctgagtctcctgtattggggtgggagggtcaggcagatgtcaccatcaatgtcttccactgtagaaggccgagtctcctatgttggggtaggaggagcaggcagacgtcaccatcaatggctttcactgtagaaggctgagtcttccatgttggggtgggagggtgaggcagacgtcaccatcgatggctttcactgtagaaggctgagtctcccatgttggggtgggagggccaggcagacgtcaccatcgatggctttcactgtagaaggctgagtctcccgtgttggggtgggagggtcaggcaggtgtctccatcgatgccttccactgtagaaggctgagtctcctgtgttggggtgggagggtcaggcagacgtcactatcagttgcttccacttggtaagcctctgcctcgcaccatggccacttctgtgctaatgctgatctactcatcctggaattggttagaataatgacagcaagcacagctgctgaccaactgggtgcttattgcctactaggcactgttaaataacggtatatttattaatcatttgatttttataaaacttatacatattttgactgttattcccatttttcagatgacagagtgaggggcagagggttgcagaatgttcccaaggtgcccctgccccagcagcagcctctgtgctggtgagcacgccgctacctgccccttaggcatacatttcacaattagagaagcctcttctacccgtgtattagtaaaactgaaaaatacagggtcttatcagtcccccacagagatagaggttgacctaggctcctggcccacactggccgggcctttcctggtcactcagggacctcaaggcatctccgtgttcatgaatcagtcactgtttgcattttcctgctttcctccctggaatgacagtccctgagcagctctgcctttgtgtaggaacctgcttccgggtcagcacagggcagactccccagcacgctctttaggaacagaccacctttgctgagaaaatcaccatctttgaagagttctgatattaacgacagtcttgctttagaagaagttgctgggctgacaataaattgtatttgtagagcacaggtagcaatgcccattttttgccctttttgcttcaattccagatacaggacacagaaaattatttgacactttctcaagaaagcagaacagaacatccagcctcacagagattccgggtgcctaacttcactgtccagggcaccagctctatgtgctggggatgtttcaggggcatgtcctttattttcctccatacttccctgaaggaagtagcagaagtttcgaattgccccgttctactggaaacctgcattccacccactgaaggatccctgagctaatgcccccactgccagcctcaggttccctcccaccttgtgtatctgcaagtgaggggaataagcttttctgtcttcatgcagaatccatactcatcacctgaaggtggaggatccaggctgaacttcagtgcatgcagtacacattcatgtaaatatttattttcaatggagaatgtaaacccgttactttgccatctgatatttggtactttgcacatctccattaaatgtgtgctgctgccttgtgtctattgcatgagctatacttgagacattgtccacctgtcactaataacatcttggagttgcacaacacaggggctgcccagcccggcgcctctgcagctccttcccatcagcccagccctgcacctctgcagctccttcccagcagcccagcccggcgcctctacagctccttcccagcggcccagcccgtcgcctctgcagctccttcccagtggcccagcctggcgcatccgcagttccttcctggctcttgtaggtcgttttccagcctttccctggaagcatcaagtgacaggaaagtggcccaggagctctcaggataagagcagagaaggaaagaatggaaaagaaggtccagaaggcagggatcttgtcctcgttccacgttaggaccatgtgatttagtctcctaggagactccatctcacactagacaggcagaagttaacaagtttgaaaataccgagtatcagcaaggaacggagtagtgagaactcccaaccagggcttgagcagggcgcgtgttggtctgtatgaatctagaaatgtgtggagctgaggcccattgcccagggctctatgtgttacaaagagcagagagctgcaaggggtgacggacagaagactgggctggtgcttcttccagagtaggggcaggtgggatttcaatctatcagcatgtcagcacagtgtattttatatacatttcattcatttatttatttttagttttatttttttgagacagagtctacctctgtcacctaggctggagtgcagtggcatgatctcggctcactgcaacctctgcctcccaggctcaagagagtctcgtgtctcaacctcctgagtagctggaattacagatgcccaccaccacacccagataattttttgtatttttggtagagatggggattttccatgttgcccagactggtctcaaactcctgggctcaagcgatccacccaccttggcctcccaaagtgctgggattacaggtgagagccaccacacccggcctatacatttaatttaaaataattaatatgtaaacagaagacaggccaaagtcacagacattctaaaacagtgaagcagaattaaaccagtaagcattggtagagaccctgtcctcccccggtcctggatggtgcccctgggtgaacaccaggtctgctttccacacccgccttccctgggtcccttcttcctctgcctcctccacctctccaaatgcctttttaccatcctgcgccactccagaaatgtgatggttgatactgagtgtcaacttgattggcttgaaggacacaaagtattgatcctgggtgtgtctgtgaaggtgttgccaaaggagattcacttttgagtcagtgggctggggtaggcaaacccacccttaattgggtaggcaccatccaagcagctgccagtgaacatgaagcaggcagaaaaatgtgaaaaggagagatgggcctagctcccagcctacatctttctcccatgctgggtgcttcctgcccttgaacatcagactccaagttcttcagttttgaggtttggactggctctccttgctcctcaagcttgcagatggcctattgtgggaccctgtgattgtgtaagttaatatttaataaactccccttgatatatatctatcccattagttctgtctgtctagagaaccctgactaatacaagatacttttatcccataaggcgcaacatcgggagccaacagtcagaggcaggaacatgccctgcactgctgctttccgggccgtggaaacacatctgtcactagtcctgaccctgctggtctagccctgcgcacatttcccagggctgccctaaggaatgtccgcaaaccaagtggcttaaaacaacagaaatttatcctctcatttctggaggctgcaagtctgagatcaaagggttggcagggctgaactccctcaggttcagaaggtggatccttcctgcctcttcctgctttgggtggctcctgcagtccctggcattcctcaatctgcagctcctcaccccagcttccatccctgtctccacacctggctctcctccctgggtctctgtctccttttctcagaagatcactggtcacaggattcgagccccatgtgctccagcacagcctcaccttggtctcttctgcaaagagcctacttccaaataagatactgggggctaagactccagcatgactttcggagggacacaagtcatccctgtgaagcaacccacaagaaacgtggagcacaactgcaatgctgagctgtggtgccggaagcaataaatgaggagtcaggacacagggacagagagaccagcccgtcctctgtgcctttggcaagctgtgtgcctgcccaaaccccacctgtcatctgtaaaatgaggatgaaagcaccatctcgtgagtttaccatgagaattcaacgtaaggcacttagcctagttccaggcatgcaagaagggtgccttaaatgacggcactgtgaccatcaccactctgaaggcatgcaagaagggtgccttaaatgagggcacttaccatcactgctctgaagggcgtgcaagacaggtgcctcaaacgagggcactgttaccatcaccgctctgaagggcgtgcaagaagggtgccttaaatgagggcactattaccatcaccactctgaagggcatgcaagaagtgtgcctcaaatgagggcactgttaccatcgccgctctgaagggcatgcaagacaggtgccttaaatgagggcactgttaccatcaccgctctgaagggtgtgcaagaagggtgctttaaatgacggcactgttaccatcaccgctctgaagtgctgtcgaaaatcctttcaaagtccactcactcttggctgatggtcttcgttagctaaagcgttttctgcaggtctccttccacaatccagtctgctttaggccgaagaaagcattggcctcccggggctcactgaccccaggataaaaacaggaagatccctcaacaccccagggtgggtcagcatttccccctggacacaagctgcggccccagggtgcacattgatcagaacctcacctgggccgtgccggcccctgcttgtaaggtggctctcagtctatcccagaagagctacctgtgcccatgtgatttctctcccttcccataccccatcctgatgttgcttccgacagctccatgcatcctgttttgttaatgaacagaatcgcttctttaacttcattaattccagctcttcatttgtgtatgttgtctatgatacttaaaaggctaatcttaatgcttttgtttagagcgtgaatttttaatatatttgaaaatgaacttgagtgtgctatttaataccacattttgttttatcacatcctaattacgtttactagctattgtcctataaaaagctattttaatctttattatctggatttttcgccactgcagcatgtgtcattttctgcagtgatgtccaaaaattaagtaaaaggtatttaagggaactctaattgattgtgcttctcaagagccctagaaaatttgatgagtcattaggctgactgtgtgcgagaggaaattctccaccgacagcctgaagctgtgtaaaatgggatggctttagacctgccgagctctcacagcactcagctcaagcctcagcatcccccagaggtgacatgcatggagttctcagtggatggcggggaagggtcaaggtgacatgcatggagctctcagtggatggtggggaagggtcatgggattgggcaccttacttagtttgagggagagtcacagagtccacatactcactgtggttgtcactgcttaccccgcgccctgctgaggctcagctgccgtctgcacccatgccatgctgtcctccagggggacctgcaggatgtaaccaaggcataacacctgtatcactggagtccaggagaaaagaagtactgagaagtactcaaaaaatattatggcctcaaacttccccacattggctagagacgtaaacctacatattccagaaactgaacaaactctaaacagaataagcccaaagaattccatacccagatccttacaattaagctcatgaaaactaaagaaaaagaaaacaaatcttgaaagcagcctgagaaaaataatacagcccttagggaggaaaaacgattcaaattatagtggcgttctcatcagacactacagaggccagaagggagtgtcccaatattgttttaagtgctgaaagaaaagaattggcacacagaagactttatccacttgaaaatatattttagtaattaaaaaaattgaaacattttctgataaaaaaaattaagagagtttagtatcagcagatctatccagaaagaataaaggaagttctctaaacagaaatcaaatgatgaaagaaggaacctgggaacatcaggagggaagaagggccatggtgagcgagagtgcaggtgacaccacagacatttcttgtcctactgagttttcttactttttttttttttttaagacagagtctcgctctgtcacccaggctggagtgcagtggtgtgatctcggctcactgcaacctccgcctcccaggttgaagagattctcctgcctcatcctcccaagtagctgagactgcaggcatgtgccaccacacctggctaattttttgtatttagtagagacagggtttcatcatgttagccaggctggtctcgatctcctgagctcgtgatcctcccacctcagcctcccaaggtgctgggattacaggtgtgagccaccgcgcccggcctgtgtttactaaattatgttttatggtcgaagaaaaaataataacactgtctgatgtgattctaaatgtatatgaagaaactatttgaaatatatatactataaatgggggagggaaaaggaaggtgaaggggagtgaggtttctatacttcaactaaactcatggaggaaggaccactgtgtatatagaatgtgtatacaactgcgtatagagaaccagagcaatttctaaaaaggccatccaaagagacactcaaaaaaatacagataaattggaatgctaaaaaaaaaaaaaaaaaagtttaagtaacttacagttaggcaggaaaaaaaagagaaatcaaagacaggaaacaaaaaataaaatatcagtcttcagccctaagatatcaataaattacatgaagtgaaagtggtgtaaatgcaccaagtaagaaacagagattggcagaggagattaacaagatgaccaagctctagtcaagaaacttacttcaaaggtaaccatgtagatggtttgaaagtaaatgagtaaaaagagataactcatgtaaccttgatcaaaggaaagcaagagtagccctattatcagataaaggagacttcagagaaaataaaattactaggtgcagagagagtggcgttataggatgatgagaggctcagtccaccgggaagacccagccatcctaagtgagtattcacaaaacaacggggctgcaaaatatgggaagcaaaaactgagaactgaaacaaaaacaaaaaacagaaaaatctacaattacagtggaaggcctcaacactccttctcaacaattgaaagacaactaggtaaaatatcagcaaatatatagaagacttcaacagtaccatcaactaaaagaatccagtaaacatttatggaatccccccaccacatactacgggataataaacattatcttcaagtgtccatgcaacttttagcaggatcagccatatctgggggcataaacaagcatcaacaaatttgtaagaactgaaaatatacaaagaatgttaattaaaatggaaacaaatttgaaatcaacaacagaaagataataggaaattctccaaacacttagatactgcacacttataaataagcaatgtgtcaaacatgcagtttcaaggcaaataaaaaataatgaggatatgaaaatgagaaccctgtaatatatcaaagtttgtgaggcacagctgaatcagggctgcgcaggaaatttacggcattaacagcatgcattcattagagaagaggaaaggtctaaaaactgtaggcttttgcctcaataaactagaaacaataaactataaaccccaaggaagagcagatatcagtaaaatcaaaaacagaaaaacagaagaggaaaccagtaaaacaaagagctgtttctttgaagatatcattaaatttggcaaatgtttagaagaaagactcacaaaaaaaagaggagaaaaagagaagacaaaaattgagaatgtaataaatgaaatgggatatcactacagactgtgtaaacttcgacaggataatgaaaatacaatgaataactctacacatataaatctcgcaacttaaactgaagagactgtttcctcgtaaaccacgaactgccacaactccatcactgtagagtctttgggtagccttaccattactaagaaaacttatttgtagcttaaaaactttcaaaatgaaatgtttagttcagatgatttcactggagaattttatcaaatgtcaaagagaacaccaatatcttctctataatatcttctagaagaaaaaaggaagagaaacacaagtttttgaagcaagcattaattacccttataccaaaagcagtcaaaaacactccagaaaataaactacagaccaatattctccattaatacagacactcaatcttcaagaaagcactaggtgacctacgcgtggcagatgcacgcctgctgttatttctcttatatccgactccagttccttttccaggctgcttgctttactgcccactattgggagagcattttccttactggaaatgagcaaatcaaagggggcgacttgcctgtcatctcctgaagttacagcatctcacctgagtagcacggctgtggcatcctgttcttggtgttcagaacacagaaaagaaatcttgtcttggccggtgcggtggctcatgcctgtaatctcagcactttgggaggccaaggcgggtggatcactgcgttcagaagtttgagaccagcctggtcaacatggtgaaaccccatgtctactaaaaatacaaaaaataggcgggcatggtgggggacgcctgtaatcccagctacttgggagtctgaggcaggagaatcgcttgaacccaggaggtggaggttgcagtgagccgagatcaccccactgcactccagcctgggcaataagagcgaaactctctctctcaaaaaaaaaaaaaaagatggttttatttctggtattcttaggtttttttctttctttttttaactcttcaggtaattctgtgctttatatttttgatggtttctgtaaatattgattgctctgtgctattgctcttggtttattttattccaaaagctgaacttcaaagccatttactttaagctttcattaataagaccatttttgatattttcatataaagagttctaaaactattttatgtttcggtcacttgtggaaggaggtacttagaacttttttttttttcttgaactcattaattgattcagaagctttgctgtaagcccagagctgtggtctacagttggtcatttttctatgggtcaccatataatgtgctggagataaagttcagtatgaaaagactgtcctctgtcttcagacaaaccatgaagtgttctgcatataccttttctccataatttcatcagtagatcaaatgttattctagtaagttgttcctgcagcctcaacatcttagagaattccaaatgactacaccaaatgagttacatggacattctctccctgagttacaggaaaatatttaaattactaattttatcaaaatttgctgggcagtctatgaggatgtctttcaagaaaccagtacacaaaaataaacattcccagactccctccgatgtgggaagtgggccgtgaggcaacccttccttcaggatttggggtgtgtgtgccaattagagtttcttccaaggcatcaagggaaaatttgtaaacatagaggaagcctggaaataatcccacatgtcattcattcactaggttgaaagaattgtgtttggaaagttctatgataagactgttttgtgggagttgtatgtacagcagtaatgaggaaacagatttttttaaaaaattccctcaagttctaaaaatgcaaatgatgagacactctatgtgtctgggaggatactgattgattaattctgaaaatgagattttgtgtagccagaggttccttagatgaaagctttctctttttccttcatcctaagcccctttggagattatgcaaatgcgttgtgtgcttatgtggccatctggagtaactttgtcctgtgccgtaaagatgggctataattactgcatgtgtgtgcattgccattcagcagtagccactgatgtttacaatttctacagatcctatgatgctagctacttagtctacataaaatgtagcaatttcccttggaatactttcatttcctattttataatcactagatttaaattctagagattgagtagctttcaaacctgagctgtgagaatgtcacctcctgtggcctttcacatagaacctcagtccttatcacactctgggtcaggtttatggaaggtgggcaaggggagctggctggtactgtgcttttcagccaccactcattgtgatctgctctcggactctcatcgccaatgccaacagtgtgtagagtatttgtgaccgccggctgtgtgtgtggcgttggctggatccccgtttatcctggaagggtcaggagctgtgtgaagcccaaggcagatgggtccttccagccttttgggccccccaccatctgctctcctctaagaggggagaggcagggacttgagctactgtgtttgtgacaatctctaaggaaaggttgacaggcatgaagatgttgaaggcacgcattcagctatccaggaaaaggacaatagcagaatgagagacaagtgaggaagagcctcccgagctatgcagccacagggccgagcacagcaggagcggggggacagtggaggtcttgtcaggcagtgtgggcagcccatggagcggagccgtggcaggactgaggactgaggactggggactgagacctgagacttgagacctgactggctccagcctccctcggccagggtgtgagtgtgtgtgtgtgtgtgtgtgtgtgccatgcactgtcagccgtgcgctgtgtgagccacactgtgtgtgtcagccatgtgctgtgtgtcacctgtgtactctgtgtgtgtgagccacatgctgtgtcagagcagtgcgctgtgagccgcgctgtgtgcgtgcacgtgtgtatgccatgcactgtgtgtgtcagagagctgtgcgctgtgtgccccgcactgtgtgtgtgcgtgtgtaagccgcatgctgtgtgagagctgtaggctgtgtgggtgtgagccgggcattgtgggtgtgtgtggagtgagagtcatgcactgtgtgtgtctggtgtgtgtcatgtgctgtgtgtgtgtggtgtgtgagccatggactgtgtgtgtgggggaatgtgtgagtgtgtgaaccatgcactgtgtgtgtgtggtgtgtgagccatgtgctctgtgtgtgtggtgggagccatgtgctgtgtgtgtgtgtgtgtgtgtggtgtgtgagccatgcattgtgtgtctgtatgtctgtgtctgtatgtctgtgtctgtggtgggtgagccgtgcattgtgtataagtgtgtgtgtggtatgtgaaccgtgcactgtgtgtgtgtgccagccctgcattgtgtgtgtgtgtgtgtgtgtgtggtgtatgagccatgcactctgtatgtgtgtgtgtatatatggtgttagcggtgcactgtgtctgtgtgtgagtgtgtgtggtgtgtgtgagccgtgtactgtgtgtgtgtgtgtgtgtgtgtatgcgagagagagaagagagagaaggagggaaagagagagagtgtaggcatcaagcacccatttcccacaagagtaacgtgtttggatgtcacagggtggctcagagacaggcccagaacccacagctgtatttctccagctcaaagcaatggctccgcttctcttctaaatgggaacattttacccgcagatttattacagagattgttaaaaataacttttaccaagttattagggtccctgcttctttcgtctggagtcgcatgaaaacatttaaagcacaaatctcgctttcaaccaacatggctgcgagtgcattggcaggtgttcacgggctccgcagcctgaagcccagagaccttccgggcagagcccaggagcagagaacccaacccgggcttcccctcagaagcggcacgtgctggtccgggccgccctccgcacaaaccaccggccgcgggtgggatgcgcttcagactgcagaccttctcgcaccgtgtgaccgatgtagtttttgtttgtttttggtggtatccctgcagtactgcgctgctgcttggtggcggtgtaaattgtactgctcttcagaattttctcaggaaagtgccgcttccagcttctgccggaacatgcttgtgggcctcatgcaaagaaaagtgaacatattccccaataggtacaatgagctagcagaaagaaaattcagtggtttactgtgttttcaaacacgcgtaggagaatagagattggctgggctctgtgcatttgttctgagttagagcaatgcctgtaaacactccccacctcaccgagctggaaatatttgcctcttgacaaaaagcaagaaagaacctgtatgcagttgttcctgtgggtctcccgggaccctgcatcctcctgttttgttccccgtaacttgcatatgagagcattttataatttttgaccaaaggggggttaatatggagactacctaattaaagttaaacagcattattaaagaatgttttctcaaaattgatacttttttctagtccagaacatacatgtgcagctggcaaggagagatgctgtgtttcacggtggatttcgcgttgggatttacctgttttgagagtaagaccaaggtaagaggccaagcaggcatccatgccgccccattgccatgtgcttggttacattccatgggcgttaacactcacgcatgtctggtagaagccaccaaccttgctggattgtgtatcgtgcagaggccttgctttcatagacttttttttctgatagctcagggccccaggatcgccacaagccctgagggtgtctggccaataggattcacagcagggtcaggtgggtggatagggaagttgaagatgctgctgctaaggagggacccacaacacttgagtaaacgctttgaaaaaaaacactcatcgttgcctgccttccatctgaacattcgtggtagcggtgaacagtgcctgtgcctgggggaatttgtggagggcggatgccaggaatgtacagctgccattaggaagggagtgagacccatttccaccccatctgagtattctcctaactacgtaagtgttaaggaaatgctttgtgaggacaatccactgttttgtcataatattttttaaaacctactctctgtgttaattaagaatgagtgaaatggaaagtgttggtaagataaatacggttgttaaaaaaaatttcaacaaatcgagttgaaagacttacttgtcttttattagcaatcccaaatcgggctgcaccccctttacaaaatagagccccgtttgttatctcatggtcatttcctaacttctgtgttcgagaacctttggatgccctctgcagtgaattggtcattgaatctgtaggttaatgagcactgggaactgcgccttctttctgagaagcctctcactgtgtggcctctctacaaaaagcaagacaaaaacctttcctaggcagggtctcccaaactggtggttttgcccccgagggacacttgggcatgtctggagacactttctattgtcaggacttggtgggagtttctgctgatatccagggcacctgcagggtggagcccagggatgccgctctgggcacagggccccacacagggcatctccagggcctactgggcaatagtgtggaggctgaaaaacctgggctagggccatggactacttcctttacggaattccagggccagaaaatttaatggagtcattgttcccctccagggcacataccatgtttgcaatgacaatagcacatatttgcataagcattgaataagaagaagggatttcacatctgccatccagtatccaggtccataattctatggaccctaaagtcacagagtgggaagtagcttcagggttccacttaggtgttcttcccgctgtccctggtctgccatatggacctgctggttccagtctaggtgacttgctcttaatattatttggaagccagttcttcataaccttactgtgcatgtccttctgagataagggaggtaatgaagcaactattcaagtgtaaggacaaactctccatacagcttcttaaagagaacacctgatttgtaacttctgcttcttgctctgtgtttcaagtaatgaagtgttccaggcaatctgaaaggagaatccaaattctgctttagagcaggtttgcgtagccccctcactgcagcccctggggtcctgtgtgtccctccactggaaggagcctgtgagctcctcctttccaggagcgaaacgctggcccaccggccccattgcctgggccagcactcaccaggggcatttatctgtacctgtgttgctgtgggtaatgtactcacaggcccttcccagccagcgcctctcacccatgctcggggctcagcatagtgtccagaggtcacgtgtctctctgttgtgattctgctagagggtctcagcacaggaagatcaactgagtctgcaaaaatgaaaagaacatccatcaccacattcagccaagccctgagccccgtacctgcaggggctgattttcacctggagtggccatggggttccttgggtgggagtgatgtttgtgagtttccaggccattgctcaacatgaagacacatttcctaccttcatttccccggtgagtttcctttcttcctgggctgccctgtgcctttcctcctcaagggcatcaccatccttctccggagccttttcccatttccctggcgtggtcaatgccaggcacagtcaggcagagccgggcttggggcctcatggggcacttcctatcatttcagacagaactgtctccagagtcagccctaaaatcaatccagtcaacttttaaaatagctataatttgtttcttaatgctgtgcaagatggggttgtgagcccttagggtaaagcagcagtgttttaaatccttggtaaccagaccgtccaactcagctgagctcctataattaaagcgcatttgtctacagcctggagtgcctccttttgcttgacagcgtgcgtatccctcacccaaaatgacctgggcagtgctagagtaagcatgccggcggtccgggggcatctgggccagctccagccctctacccgctctctctgcttccagggaggaacttttcacctcctcagctgaggttcttctctgctcgctgtcctctccactctaggtcaactttgtgtaaagattcaatgaagacgtctttttgctggtctgaacctgaggctcagaggccctgacctgctgacctattttcctttgaaggagagcacttgacctcacatttttctcgtgattatttctttatttcaaggagttctggcctaactccttgttgagtccattcagacaacaactgaacctgaaaatagcacatgacaacataaacaattgttccttgtagtttattttagaatttgcaatatttgaattaatttttttgaagaaaagctttcccaccttaactgtgaaggataaaccaatgggttgtaaattcataaaatgtttataattttcctttatttggcatcttgtcactcatgtcaatgtaggatgacatttgtgagtttggcgtcagtaggctttcgattatttgtatattgataggaacatcaatatgatgaatgatatgatgaaagaattatgaagataaatattattgaatatgaaatgcttctaaataattatttaaaatgttactttctccggtacccacatgccctcttattagtcattataaaaaaatcaaatagattctgtgcctacaaatacttagattgggagttaccatgcttatattcacaagataattagcacttttacaccacactatcctgttaactgaggacatttgtgtattatttctgggtcaaaactagaccatgacatggcaacaatgcctattcaccaaactcttgcaaggaaagaggttctggacttgggaggccaacccaactcatttgcagggacatcctccttcgaagcctgtgtgtggtcagatttcttgattgcccacttctgcttgccagataaagacaagcaattatttcccaggctgaatccattcaccatcaactatctattttcaatgttgagaaaggaggtaagcaggaaaaaaaatgtgtttgaccatgaaaatattttctgcacttacaaaataaatgagaagaccattatctaatctatatggcctaaatctctcgatgcaaagttttttttttaattaaagaggataaactagaacaccccctagctgctagagatggagggcgtccctgccccacgcaggcgggtctcctgccccgtccaagcgcagtccaggccggcggggcctctggacgatgtccacatcctcttctcactctctggattagcactgacttccctcctgttccatgtaattaatcagaagtgggagaggacatcgacaagaatagaacccacaatggtgagggagaaggggaggctgaccctgggtgggcaccaggcagcctgggtccaggaggggtgccgcctgagtcctcagcctccacggatcccaggatggagcctggccatacgtgtaggaccaagagctgctggagaggcagaaccaccgcaggattcactcgttcttggggacacgttgaaaagctagccttgtctctaaatggtaacttctattctaaatctaccaccaggccacttcccacaccgcagcaaattatgattctgtatttagagcgattggtgcagactctcacaagagtgtcctggtgctgtcctggcccccatgggacctgctccttagctaggaacaggattcctgtggggctgagttaaggttgatggagaggaacaaaaagatcagtttttaaaagctgaaaaggaattgtttgttgtggaagacgaagtgcagacttgcctttggcctgatgaggaagagaagcaaatgtctccacagctcccaggaaaacatcaagaaacgaattaggtttgaactgagagcacctccaagtccttgtcatggagttgcctggtactgcctgtggcatctccaccgtgaaggattcaaggattatcttccatgatcggtgtgttaacaatcagactgtgttgcagaggaagtattaccttccattgtcagtatattaataatcagaatgtgttccaaaggaagtgagatgtgattatcatctttaacaacctgaaaccatcacagtaataggtaaacattagcatgtttcatgtaacatgcactgaactgcaaagctgctctttaattactaaaactatggaaaaatgttttctgtcttccaagagggagaactaaaaatccggcttcccttcagcttttatctgtgccacgggaggatgggtccacccaagtttatcccccaggatgtggagcaaaaaaaatggctctgatgtgactgactgcccaacagcgtctctggagctgtgagtggagcacatgccacattccgacctagaatgtccaattgcgctttggagaagggctcagaattgtgaaattaaactgttacccagtccacttttacataaagtgtgcagaaatgccatccataatggaaaaacaagttccttttctacagaaacattgctgttttcaggtgcagaagagaaaatctgtgaaacagttaaaagaggccaccacaggcgatttggaagggacgattatgagaggagccaccacgtccggccacacagctctgagaagggcagaaagagagtcacgcctgcgcccatggagccccaacttgtacctggaccacgctgcagcctgtcccaacccagagaagctgacgagatccttgtcctccatcacccagacaagagctagatggtaaaattaggacataattttaagcatatatactggatatgtatgcctcatgaggaagggttattctcaaatctgcaaatattgagtacagttgcagtgcaatatcaatggaccataaagacaataatcatatacctaaatcacttcactgtgaggaccattttgaattctttaaacaataaacaggacttttacatagatatttttgcactttttgtatataatgttttaatagcagtttacaataccatgcaaaatattaatttaggttattcccaggaccctatcctaataggggtagaccactactgcgctctttcttcaaaatcaaatttgaaccaaagactcttactgctgctcacagagtcgtttgttgcttattttgtgagaaattaggcaaaacctcaatagccaagactgcctggcttctcctgatggatgagcacatacctatgatcacaggtccctcctacaaatgatggataataggtccttttaaaggcagatgagacttacctgaatctaaggggctgaagtcacagccttcacttaacagctttcagagaaggtgctttggcgctgcctaggcaaggtggaattggtgtggagtgtgggaagaggctctccggaggcaggtgcagtgggtggagcagggcaggagtggctcgggcagctccctcactgggacaggccctccaggccagctgtggctgccatctgcttctggggcttgcctcagtgccccagtactcacatcacgctctcttctgctcgcgacaagaatggatacacatgcttcacttctggaattgacaaccacgggatattagtccattctcatactgctatgaagaaatacccaaggctgggtaatttataaagaaaaagaggttgaatggactcagttccacatggctggggaggcctcacaatcatggcagaaggcaaaggaagagcaaaggcatgtcttacgtggtggcaggcaagagagagtgtgcaggggaactgccccttataaaaccatcagatcatgtgagacttagtcactgtcacgagaacagcatgggaaagacctgccctcatgattcagttacctcccaccaggtccctcccataacaattcaagatgagatttgggtggggacacagctaaaccatatcacatgggaagcagtgactgaagcatgattttggaatattctctttctagatagtgtctggcaattctaatgctaaaaggatcctgatgcccaaagtctgtccaggtgggtgtgggctcagtttcctcactgtgaacgtggaagagacagagaaactattccctaagatcctatgaagttctaaatttcccaaaacctagaggaaacatgtgctttgacactttggcgtaaaatgcggagattctatttagctcctggatttaatataaagaaaaagatgtggccaagaatcttgaggctagcgtgtgggcgggaaataaacccgtcaatggtcagatgggatagaaatgttcttgaaacttcttccctgttttctgcagcccctttgtctctcctgacacttagagaaaaatatgttcattgtttaaaaataaaagcttttaatggaaatttgacgtatggcttgccaaaaaaaaaattactgttccctggtggaattttcctgggaagataaatatttattataatgaagtatctataattaaagactatcttttatagaagacatccattacgtctttctttgctgcagccttttttatttatgggagtaagagtttgtagagtacatttcatctttaacgtaccatagcaaacattaagtgatttttgcagtagtattaaaaggcgatatttttaatttttaattttacatttttcaaattggttcatgaaaaactaaggtttagtgtttcacatatagccatagatggggtggtgtcagtcaggattaaagtttttcattttatctgcacttttgactatgtcttatataatataggaagaactggaacttttagtgattttttctgaagttctccaagcagaaaaaggaacaatgctcataggatgttttaaggctgtgtacaggaaaacacaagggaagaccagaggggtcgactgcaggtgacgtgggactgaggaccgtggatgctgatgcatccccaagacatgtggggcagctactggaggctggactgtggggcgggagagttgagtgggctggaggaggtcagtttgcaaagattgaagaatgagaaagtagagacagacaaatcatcacatgctaaacgtcgatttaaacattaagtgaatgtctgttgatttaacgaggctgtttaatgtagtaacagatgctaattaaataaatgagctcttgtttagaaatcgctaattaattttattcctttacagaatgtgctctggagatttaaattttcccagcttaagggatcttcagatgatgggaaaactcgagtaaagctgctgtttcagaatctggacaccaaacagattgagacgaaggtatgcggcatggggcatgggttattctgccaccacccacacataaagtacagctcagagggtccgctggtaaaaatctccacccctcccatgcacacaaaaataaaccaataggtcctgaagcacgagtccttcctgaaaattaggcaataaatacgccgaaagagcctgtcgaggtcaaatatcccttatctgaaatgcttgagaccagaagtgtttgggatttcagattttggaatatttgtggattaggtactgattaagcatctgaaatccgaaaatccaaaaagcaaaatgttccaatgaacatttcctttgagcatcaggccagcattcgagaaggttgggattctggagcacttagcatcagggcagcattggagaaggttgggattctggaacatttagcatcaggtcagcattggagaaggttgggattctggagcatttagcatgaggccagcattggagaaggctgggattctggagcgtttagcatgaggccagcattggagaaggttgggattctggagcattgagcatcaggccagcattggagaaggttgggattctggagcattgagcatcaggccagcattggagaaggttgggattctggagcatgtagcatatggccagcattggagaaggttgggattctggagcatttagcatcagggcagcattggagaaggttgggattctggagcatttagcatcaggccagcattggagaaggttgggattctggagcattgagcatcaggccagcattggagaaggctgggattctggaacatttagcatgaggccagcattggagaaggttgggattctggaacatttagcgtccggccagcattggagaaggttgggattctggagcatttagcatcagggcagcattggagaaggttgggattctggagcatttagcatcaggccagcattggagaaggttgggattctggaacatttagcatgaggccagcattggagaaggttgggattctggagcatgtagcatgaggccagcattggagaaggttgggattctggagcatgtagcatgaggccagcattggagaaggttgggattctggagcatttagcatcaggtcagcattggagaaggttgggattctggagcatttagcatcaggccagcattggagaaggttgggattctggagcatgtagcatgaggccagcattggagaaggttgggattctggagcatttagcatcaggtcagcattggagaaggttgggattctggagcatttagcatcaggtcagcattggagaaggttgggattctggaacatttagtatcaggccagcattggagaaggttgggattctggagcattgagcatcaggccagcattggagaaggttgggattctggagcatttcagggtttggattttcatttttgggatgctcaatctgtataggatgtttcctgttagagagacgtttatatcctaaaatggtgaccattgaaacaaagtatttgattttactaaaatgtacaagcttcttagtaaatattagcaggaaatcattattttaaaatataccagaagtcaaaatttaaaggaagggttttacaaactgtattttgtttgcacactgtatgtgataaattgactataatatggagaacaaacttctttgttaattaaagaccttagaccttttaaattcattgcctggaggtgacattgtactattgacaggtgttgacttttaccatattttatgtataaatgtgttgcccacaagccagtttaatataaacttaataagactaaagattaaatttactaaactgaaaaataaattttaaaaaatagactcatgaacacatacggtgtggaaacagattgtcaatactttgcacacatttttttctctgatggaattaatctgagcaacatgtcacacatggcatttttatacgtgaaagtttaggtcaactttgatcctctcttcattgatctcaatgaaatgacactttatagttgcttttaagtacaacggaaattgtatgggattgtttgacatttttatgttttggaaattgacaaaagcaaaacctgaatgcagatggtacagacactgtggctcctgggctgggggagagcgatgaggcagcggcactcgtgctgaccgcagtgcctgagcaggcaaggcgctgacctctcagcaggctgccctgagccgcatcctggggtcgtcagccaccagcaaggtgggaacgcggagagagaggcttgacatcagtttccatctggtatttcactggcttggatgtgaatggatcagggatgaaaatagaatgttcttcctctggtttgtttatttatgcagctgtttgccttgggcgccatcaccggggaggagcaccgtaaccttttgctgccttaatcttgtggagctctgagtctcatactgtgagggtgccggaggtctacggtggccatgagggtttcacgcctgcggtgtccccgtggctttctgagcctctgtcatccccggggctcaggcttcaggacctccagcagctcccatggcatctgaaacacccttttgacagtgtctgttgaggttaaatgtatttgtgttttatttgttaatgatcagtcagctcttgattatctgttaatgaaaggagcatcagtatcaggtcacctaagacagaaaggcctgaaatatgttagattcacgtgggacacaggctttgagaccagtatcaggtcacctaagacagagaggcttgaaatatgttagattcaggtgggacacaggctttgagaccggcatcgctgccttgtgatgctttgtttggattgcatctatttccatcgtgggttggtggaaaagagaacgccccagggagttacagaggccacagggatggataccagattcgtaggacttgtagtttaaacaatttgtggaaattttttatgaaaaaaaaatgtaaaactgcaaatacagcaacctagctacacttagaaatgagtgtagggcacataaatatgtcccaacaaacccaaactaaaaaaacctccacctccatttcccgtgctggatctcagagccgcccaaggcccctccgtggcacccctgggatgagagggaggaacttgggtagacagaggtagggacctcacaagagcagtgacccgagggccctgggcacgtcgcttgggcccctcagctccctgggctctgtgcaggcaagggcctcacagcttacacaggaagaagaggggacacagatgaggatgacagcatttcccaccttatcccacagagtaggaaacacatatgtggataactgcaaacacttagtgcatgggtgatgggtgaccgtgggcattttcagaagtcaccttcacacactgaggttgtgcatttatcaacgtatgagatatacagaaagttagaacatggcagctgggaaatgaaaactctagaagctaatgcaagacttaaggagtccacgggaatgaattctgagttgaaactcatagctattgcaaatcttggatgttagcaatatgttgtcttaagaaataggaacattttattatctcaatacatcaattaaccaggagtgccagagaaaacaatattcctagtaagttgattttctagtgaaatgagtggtaaccatgaaacaagtttccttttagtagttgttgaaaatatttctggaatattctaccaggacgctaccttagtaattagtgcatgatgggaacacttgagtttctcctgaaatctagggaggagttctggggcttggggagcagagtgaaatattcctaccatccattatttgcaaaaatcacgtagaattggccgggcatggtggctcatgcctgtaatctcagcactttgggaggctgaggcgggtgaatcatgaggtcatgagatcgagaccatcctggctgacacagtgaaaccatctttactaaaaatacaaaaaattagccgggcctggttgcgggcacctgtagtcccagctactcaggaggctgaggcaggagaatggtgtgaacccgggaggcagagcttacagtgagccgagatcatcgcgccactgtactccagcctgagtgacagagcgagactccttctcaaaaaaaaaaaaaaaaaagaaagaaaaaaagaaaagaaagaaaaaaatcacgtagaattcaagactgtaggatgatttcacacagattccaatggctggaaattttaggttgcagtagtttttaaataaaatatttttcttcctctttgactgttttttcctttaaaaaaaaagagtggagaggaagcaaatgttattgaatgaagaatttacttccatcctgtgctgtttgttattcatgcaaattatgtcagattatagagacatagcttggcgctcactgcacaggggaagctgcccttccccaattcccacgaaagatacccagggaggcccccccatgtttctgtgtatattgcttatattttgcatatttctttataattccatttttgcctctaggctgagcctccaaagggaaactttagtttagcttttttatattcagcatgagggtcagcacatatgtacacttaaatgttttaaatgaataaattaatgaagaaggagcaaattattgttaaagaaactgccaaatatactcacaggagtttcatcagttctaaggagaaaattgttcctattgtcaggaaaatgggataccttaatgctcactggagtttcatcagttctaaagagaaaattgttcctactatcattaaaatgagataccttaatgactccatgcagatgcatacagaagtttctgatattcccacatatatatccatgaagcagaggttgtgccttgaaagcagggcacattttactgaagaatcatgtctctgggagaaacactaccgtgtatttttcactctataatgatctgtgagagtaaaccccactgaaaattacgcctctgccatcaatgagtcagccgagtgtgccagccgcagatggaggaagattgggcgtgggcacctgagtgtttaggaccacggagggggtggcagaccagaaggaaattggggtgtttctgatactgagacctggctgctgagttttcttggcaggagcaccgatcgatgcccacagcatttatcactgaaaagactgaatcgagggtgctgagaaaactatttcaggaagccagatggtgccaggagggagggccagtcccagcaaaatgtcatccaacagagaatttcccatctccctgtgcatgaaccaggggctcctaaatgttctcatgcagacggatatcaaaaggaagagcataaacaattaatatgatacatgtgaagcacaacgcccccttccctaatacagatctgaaattatttttaaaattctcatctcaagaaaatgaaaacaaaagcaaagccttctttcttcctccctccttccttccttcctttccttctttcttccttccctccttccttccttccttctctccttccttccttcctttcttctttccttcccttccttctcttctctttccatttttaaaattaataacctttgatagaaggctggatagtcgattcattccagaaaaatgagttgactacttttaggatgtttgaacacaacatctttgttttggttttaagtctctcaatagctgcatccagaaacacaatattcaaactaacaaaaaaatatagttgaatcaaatcttttttctaagcagtggcaacaagcaagtgtattatcattcagtaactaaagttttcaaaatggtaaattgaagttaaagcattcagtcacaaaacttcacttgcagcaggggcaagtcagaatgaagactgctctccagaggcaaccctggagtgtcagcagctaactcccccaaagccagagacacgggaatatttagggccctaggagggaaaatccacatccccagaaaccaggtcaggtgcgtcctgggacttcatttcctagagaggaactgaggttgaaagggaatggagctggagttccaatgcagaccccataacactttaactgtttaaacctgagttggccccaggagaaataataaaaattaatatggcctccttagatggttttgaagacatctggtaccagattcaactccctgagtctctgaccacctctctctttgtctctgtctctatctctctcactctgtctctctctctctccccctccttctacccttctggtgcagagtcctcagaggctcctttcctactggggtacctgagtaatctgtggtcttggaggctcccctctactgcttggggttgatacaagggaacctatcgctgcccaatgatttgggggcactttgcacgtgggaacctgggaagggcccctgccactgaacgtcactgagcagggattgctttcatgaatatcccaccctccaccttttgaaagagggctcagaggaaggcccagatccaagcaggaagtgccgccgctcaaggccatttcattcatagggcacattcactttgtaaaactcatgagccaaccccttacttttctcaataaccctgtaaattagacatgatctaccccaggtccacacattttaacagattcagaaaattttgaccaaaagaaacattgtgctgtgagtcagaggcagagcctacttagctccaggcatctgcctcctttcttaagagttgacctaaggagaggtaggaagtggaaaggaggtgggtagggtctgtctctctgatcagaatctttttcatagaggaaaacacttggatttccaaggacagcttctggtcagcttggagctcagtggcttttattgcaacaagaagtagcagaagtgaagccctgaccacagctgtttcatcatgaaagtgggtggaaacaccaataaaactctgaaggacacatggctgagacccccagtaggctgggacatggctaacagtcacatggttgagaccccccataggctgggacatggctcacagtcacatgcctgagaccccccagtagactaggacaagactaacagtcacatggctgagaccccctgtaggctgggacatgggtaacagtcacatggctaagaccccccggtagactgggacaagactaacagtcacatggctgagaccccctgtaggctgggacatgggtaacagtcacatggctaagaccccccagtagactgggacaagactaacagtcacatggctgagaccccctagtaggctggaacatggctaacagtcacatggctgagacctccccccacccagtagtgtgggacatggctaacagtcacatggctgagaccccctagtaggctgggacatggctaacagtcacatggctgagatgccccccagtagtctgggacatggctaacagtcatattgctgagacctcccgccacccagtaatgtgggacatgggtaacagtcacattgctgagacctccccaacccaggttagtcagggacatggctgacagtcacatggctaagaccccccagtaggctggtacataggtaacagtcacatagctgagactcccccataggctggtacatgggtaatgtcacatggctgacaccccctagtaggctgggacatgggtaacagtcacatgcctgagaccccccagtagtctgggacatggctaacagtcacatggctgagggtcccagtaggctgagagttggctaacagtcacatggcggagactccccagtatggctgagttgggatggtgttagcgcccagtagctgagttgggacagtgttgcagagtggcagaaatgagccttcagtcaagtctctgattttcatagctgctgttgcttattgaatcatctctagtctttggaatgccacagtttaagttttctcagaagtaaaacaataagacatgcataacattgataatttgaagagtagaaatatagtgcatataaggattttaataaagaagaaaattttcaagccagaatgaaaaaaagagaacctattctattaggaagtcaactaaaaacttcatgaataaaattaaatttaggttcttctttagagacttcttggagccaggaaataattcagaattcagcctaagttgtaagcaaataataaaaattcaaaaacaatggtcagcgctagaatctaataacaggtgtgcagttggaacataaattttctctctccagtcccccagttttaccaaagataaatcatagtaggcccaatttatttttaaaataagttttagttttattatgttaggcctggttatttgcataaagtgcagcaataataatgactggccacatgggttccttctacgttggttttgccagaatattttcttagggaatttcagattagactctttaaagactcttgaggctgggaagccaagccaagtattgaccatcagactgtgctggtagtatctgtatgaattgggtgaattccttccttttcaagttcccaaaatatctttaggttcctaggcctgtctgaaagtgatgttctgtgcttgccgcaaggtcaggaatcttgtaagggaaccttgtaagcaagtgaccatgccagtctttccaaggtactatttactggccctataaagtcaacgtcagttcctcaaggcagtctggttatatctaaaaatatgccatttcattatcaaagccttgataaaatgaccagtgcctccagtcaagtcctattacaaaagaaaatagacttttattgaacttatgcaaataactctgtcaccataaaataagaatactcatgaatggtttctgaattctggagaaataaggtaaagggaaaggtaaatgtttaagttttgctcacaaaagtatagtttacccaattgctgtaagctgtaaatagtttaaaagaaaaaaagaaagacttttttactctgtaaacaaaatgtgatcagcaatgtttcaaacaaaaagttatacaagttatttcagtccagtatcagttcatgtatttagttctcactctgtttaatgttgtgttagcaatcctcatgaacacatcagttttggttctggttttgttttaaagttctggaagtttttaagtagtctaataggatgatctccaaagttatcagaaaccctcatttaagtgtacttgtgatccttcgttcattttgttaataagattcaaagcttttactgtagttgattatgcttttttagaaaagttacagtgaaacaataattgcctgtgggtgacaaaagacagaatagccatggttaaagactcaattggcaaagaaatttggttatttctgtgacatacagcaattaaacgtagtcaggattatcactgataatatatacctaggcatatcagattttttttttttgagatggagtctcactctgtcacccaggctggaatgcagtggtgtgatctcagctcaccgccacctctgcctcccggtttcaagtgattctcttgcctcagcctcctgagtaactgggattacaggcacctgtgaccacgcccagctaattttatatttttagtagagatggggtttcaccatgttggcaaggatggtctcgatctcctgacctccagtgatccacctgcctcagcctcccaaagtgctgggattacaggcatgagccgctgcacccagccggcatatcagattttttaaagacatcttatacaattttggtacatatatttataatatatccaaacaaatataacaaataagttaaaacgactttttatgtgatattgtttctcttatgatttttacataccaaggaaacgtaatatgcctttcttggacttgcaggagccctatttggacttccagaggtcttaatgttcaaaaattattttaaggtcaaaaaggcaattttagattttgaaattttattttggaaagcctatatcaaatatctcaaaggtttaacacacttgaacaaaacagcaacacaagtcactgagaaataacagtgattcatttaaacaaagtgataatcaaaagatttcaacagcaaaaaccattactctttgatagagaggatatgcagttttcgaaacaattaacagacttcgtaaaggaagcatgaggccaacagaatctgtcactctcccccccaccctttttgcaatctactctgaatgtaaatgaaaaatcttttactatctcctattaatattacatgaaaatcttgctcaaaacaaaaaaaatcacctttgcattggcatattattaatgctgaagcaaattttaataaaatcttataaacgaatccatttaatctcaatcagctttgacacacaagataaaattttcataaatattttataacctcttacacatttttccattctctttcttttctcaactttgtatatccttcagtttatctttttctttcttcttttattctttccattaaatgcaaccttagaataacctttacattaggcaaagccactttcctgtaataaaatcacacccccaagtctttcttgaaatcttccttacaaaaaatatatcttcttatattttttatataagaataagtatattttcttatactctctgtatatagaattgtttctcctcttatctccagtttttgttgctggaaattagttagaattttaactcttagtagccttaatgtatagtgtaaacctaagaagtaagggatttttttttaactgtcactcaggtaccaacaatttatgaatacacattttataatcttagaaacataggctttctaatggaacaatgtttcaatttggaacaggacatttttactaacagatttcaatatcatttgtttctctgaaataaggcaaaatatataagcttaaactcatatttaataattgctgtcttagtattatatctatttggaaatgactgatatgttcgatgaatatcatcatcatttaatttagcttagcaaagctttaagggtacagttaccaaaaactttgagaagcctttttaagtaaacatattataaaacaattattactaaaagttcatttataaactttatcccatttacagctgtttaatttatctattcattctaattttttggaaaatttcatgggacattagacaaatccagccattgtgtcaagttaaattttctgttaaccatttttatattactgtatgttatgcaggtatcgtaaaagcaagaaccttaaagttaaatgcaagcataatttactgataactccaaaaacagttgtttttattaaacaaacaatattaagctagttttatttaccaaaattcttactcaaattacctgaacttggaaaatatttgggtttacttatttatgaacactcacttatctttaagttagtttagtactgtattagtctgttcttgtattgctctaaagaaatacctgaggctgagtaatttataaagaaaagagatatacttagtttatgcttctgcatgctgtacaggaaggatgatactggcatctagtcgcttctggggaggcctcaggaaacttttactcatggtggaaggtgaagggggagccagcacgtcacacagccagagcaaggggggcgagggatgccatccacctttaaacaaccccatctcgtgagaactctatcatgagaacagcactagggggatggtgctgaaccacgagaacccaccccatgatccaggcacctcccaccaggccccacctccagcactgggaatgacaattccatgtgagatttgggtggggacacagatccaaaccatgtcaggtaccatgtaggtaatatacaaacatgtggatagacacgtacatgcatgcagatacaacatatgacatacgtgtacctgtgtatgtatctaaatgtttaaaaattaaggaatttaataaaaaagaatagagctttacacctgagaagaagctgtccacccacaactctggggctccgtgaggaaaaagagttcctctccaaaaaagagttttgtggcaccaattctggtttcctcaagaggtcttagggctgttagaagatttttttaggtcctctcttgtggtattgaacgggacaggagaaagaaggaacagaaagaagtaaatgaaggacagatcttagaggagacagatggaggagctcttgttttccaaaaagctaataaagtttcacattatccttggcaaaaattctatcaactagtggagaaacacacaaaatgagtgcattggttagcaggggtttaagaaaagagggactctgtcaccaagatgctttcatagaaagaacagaagcctcaaaacgtgtgtatccacacacacacatacacacacatgcacgcacatatacacacatacacatacacacacagatgcatacacacacatacacatgcacacgcatacacacatgcatgcacacacacatgcacacatacacacgcacagattcacacatgcacatatacacatacgcacatacacagacacatttacacacccacacacttaatactagctttaattaaggttacttttgactacagactcttaaaaaatccttttataaggtattagctgggcaattagcaaacattcctggtttttttttcttttttctttttggaatttacagaaagagttttagaagtgggacatatttgtttattagagatctagggtaatcattatttaaagctgtttgtctttggcttaataaaatgtttcctttttctctgagtaaatggttttatttagcttaagagaaaaggctaaaaaacaacaacaacaacaaaaaatgtctatcgcattctaaatataaaccaaaattttaaaccaaaggtgtatgtgcacagatgactcaaaatgaacacaaataaatatgcatgagcccaacttaagaagttctccctggcattaaccaaggtctccaaagatgaagcaaaactctccgccttttcaagatccagacacctccagggtcagcttgagaaagaaagttctggtagcatcagatggggtgcagctgtatctgtcaggtaaaatcttccagggtctcacttctcagctgcctgtctacgcacaatggccaggttaaaaggaacagccaggaaaacaggaaaacaaaagtgtccatgggggtagtgcagggaagaaaatataattgcttttctttccttcatgtgttcttagttttgacactttcctgaaaacaaaagtccgattgacaagaagaaaccagcagaagtttattaatgagtgctgtacgcatcgtgtgggggaggcctttgacgcttattgacgagtgttgtacccatcgtgtgggggaggcctcggaagtttttctctgtcaagacagttgcttggggactgtgctcacatagtatttttgcaaagaaccacaaatcctatatagtgactaaacaaagaaaagagcatttccaggcttccaagaggtgggaaaatgtgggaggtgaatttatgggaagagtaaaatctgttcctagagcctctggtgccactgcctctgagcagataaacaagtgttgtgaggggccttttgaggtgggaaaggaggagaggaggccaggaagctctatctttgtacactgctgttccgccatcaggctagtggaagatgggacaaggtccctggcattttcaccttcttcagctcaacaattctcagtgtttttgagaggaatattttggttttcttcagtagaaaggattatacatgggtcccctaaaaggtcaaaagcaatataaataatttaaacaaataattcaaattaattcttatacatatttctctcctaagctaagtgcatcctctgaggagagggattctgtggtggtctaaagaatttccatgctgtttcaaatctgatctcacctggaatactgcctagctaattccctagatgagactatggcaaagacatgataatacttacatttcccagggactgggaaaggcctgggaaagcctggtgttccttttgtaatctgtgcagcaaggtggagcaggcagtttgaccgttcacaaggatgtcttgagaagttaaaggaaaactctcaaaaaaccaaaaaatttaaatctcttattatcagatttcaggtgggacagacagaaagtatgtttcccattcaattagtcgggttccacaacctgctttttaaaattgtgcatgcaaacatattaatttaagaatttcaaaagacttgcattgtgaccattgttttttagggtcaccttgagtcacatgggtccatttacataggtatttgcaagacagagctccataaatccagcgggtgttgccaacggggtgccccttaaaggagagctcagttttggtaagcagtgtcccataattttagcaattccttttcaaaagtgaccaaggctggcatagtctatcaggtcgatgtgtgccggttgatgagtgtcactcctcaggttgtcaccagtgagttgtgacttgtcctctgggtgttagcagtgagttgtgacttgctcctgtgtgtttcagaagctcccatcaccttggggcagcagattgaccatttctttctttacctttccaaaagcaagagtccctaaaatgttcttccagtgagggatgctctgtgaggccacgtcgtgtcctggacaacattgctgaaacctctctaatcccctagagcacccatgagggtcagagctgcaatggactcttctcttcagggcaaaagaactcactgtcattcaccttttagtttggagctaatggaaattggtcccaaatgaaatgacaggtcctaattacaaacactagaaagcagctgcaattttaaaagcatgctgtgtaaatttgggcctaaagaagtgaaaccactggtgctagactggaatactgtgaagcagaccttctgctgcgagctaagtccaactgactttgtcttaataactttacaactatccgggggtggggaatgtaggaaataacttctgggaatgacttggaaccaggatcccttgactttattctttccttgcctggtaatcttgactggtaacttgagtgagacaagccttatgaagtttgtgggtctgagagtcccacccaatggaatcccagttcttgaccttgtctgaggcacactttgggggatccttgtgtggccttgaatgctctcagcattgcacttgcaggctgtcagtagctcacttgatagtgtgtggcctctacctcagcctggcatctctctggctgtgaagtcatcgttttcttattttaaggagtaaaggtatgataagcctgccagataatcagatgtctcaatggtgctcaagagctttaagatctctcattgcatgttcagaaaaatgcacactcctgggcagggtaccaggaaggcctgaagttcatgccctggcgcggtttccagcttcacgacataacccagcctggtgcctgcttggctgcctcttccctccagctgttcttcacgacacaacccagcctggtgcctgctcggctgcctcttccctccagctgttccaaggacatgcgctgcaacgtctcatctccaggcctttgttgggttccagttctcagcttgtcttcctgtgaagttgtgtccttcctttctacattcatttggtaaacatatgtcaaaaatttactatgtccaaaggtctctctgctagtgagtgaaaagttatccctgttaattttgagacattaagatgaattggccattcagaaattaggggaaaatagaaatacaaacagaacttactataatgttacctgatgtgtgttgtaaaagtgcaaggacaaggacgaggtggattcacaccttaattctatcagacattcaaagaagaatgggtatcaattttactgaaactattccaaaagatagagaaagacggaatcctccctaaaccattatgtgaagccagtatcaccctaatgccaaaaccaggaaaagacagaacaaaaaaagaaaactacagacaatatatctgattaacatatgtgtaaaaatcttcaagaaaattatgctaataatttgctaattaaattcaacataatatgccaattaaatccaacagcatatcaaatagataatacaccataatcaaatgggtttcatactgaggatgcagggatggtttaacatacgtaagtcaataaatatggtacatcacataaaattaaaaacaaaaaccatattatcatctcaatagatgcaggtaaagaatttgacaaaatccagcatctctttatgattaaaaccctcagtaaaatcagcatagaaaggacatgactttaggtaataaaagctatctatgacaaacccacagccaacatcatactgaatggggaaaagttgaaagcatttctcctgagaattggaagaagacagggacgcctactctcaccacttctattcaccatagtactgaagtcctagccagagcaatcagacaagaaaaacaaatcaatgacatctaaaattttgaagaggaggtcaaactatcgctgtttgctgatgatatgattgtacttagaaactgtaaggactcattcagaaagctcctagatctgataaatgaatcatgtaaagtctcagaatacaaaagcaatgtacacaaatgagtagcactgctatacaccaataatgaccaagcttagaattaaatcaagaactcaatcgcttttacaacagctgcaaaaagtaaaatatttaggaatatacctaaccaaggaggtgaaaaatccctacaagggaaactacaaaacactgctgaaagaaatcatagctgacacagacaaatggaaacacatctcatggttatgaatgggtaggatcaatactgtgaaaatgactatactgctgaaagtaatctacaaattcagtccccatcaaaatatcataattcttcacagaactagaaaaagcaaacctaaaatttatgtggaaccaaaaaggagcctacatagccaaagcaaaactaagaaaaaaacaaatttggaggtatcacattacccaacttcaaaccataatagaaggctatagtcaccaaaacagcatggtactagtacaaaaacagacatagaccaatggaacagaatagagaacccagaaacaaagccaaatacttacagccaactgatcttgacaaagcatacaaaaacataaattggggaaagagaactctattcaatatatgggtctgggataattggcaagccacatgcagaaaaatgaaagtggatcctcatctctcaccttatacaaaaatcaactgaggatggatcaaagacttaaatctaagacctgaaactataaaaattctggaaggtaacatcagaaaaactcttctagacattggcttaggccaatgagagttcatgaccaagaaccccaaagcaaatgcaacaaaaagcaaaaacaaatagatgagacctaattaaactaaaaagctcctgcacagcaaaagaaatgatcagcagagtgaacagacaacccacggaaagggataaaatcttcgcaatctatatattcgataaaggactaatatccagactctgcaaggaactcaaacaaaccagaaagaagaaaacaaataatctcatcaaaaagtgggcaaaggacatgaataggcaattctcaaaagaaaatatacaaatggccaacaaacatatgaaaaaatgctcaacatcagtaatttgcagggaaatgcaaattaaaaccacaacatataagctaccttactcctgcaagaatggccataatcaaaaagttaaaaaacaatagatgtcggtgtgaatgtgataaaaagggaacacttttacctgctggtgggaatgtaaactagcacaaccactgtggaaaacagtgtggagattccttgaagaactaaaagtaggactgccatttgatccagcaaccccactattgggtatctacccaaaggaaaaaaaagtcatatgaaaaagacacatgcacacaaatgtttatagcagcacaattagcaatttcaaagacatggaaccaacctaagtgcccatccaccaatgagtagataaagaaagtatggtacatatactccatggaatattactcaaccatacaaaggaacaaaataatgtcttttgcagcaacttggatggagctggaagccattattctaagtgaagtaactcaggaatggaaaaccaaatatcacgttctcattcataaatgggagctaagtgatgaggacgcaaaggcatacaaatgatacaatgggctttggggaattggggggaaggatgggaggggactgaggaataaaagactacacattgggtatagtgtacactgcatgggtgacaggtgcaccaaaatctcagaaatcactgctaaacaacttaaccatgtaaccaaaaacccccattccccaaaaactattgaaataaaaataaaaatgaatgttcaaaacgtgcatggacaaagtactcaaaagactacagaaaagtgaattgtttcttaaatggttatgttgtttcttcttgattataatcttatcccactaattgcccttttcataaagagattcatgtgtttttgtctctcaacttggggcccagccactgtgaccctaaagcgcactgagcctgtgctccttgcgtagaggaccttgaacatacccccgtgcgttcctctgcatcagctgctggctttccatgtgacagatgctccgtaaatgtttcctgcaattaaccatgctttgagaaactttatcaacatataagctaatttttaggagacatgacagaatgggtcctgacatacttcctggctctctcagtgttgagagaagcccagcagtggcctgagccgtcagcagccaaccacgctgcctgctgtccaggaaaggtgaaccagggctatagcttctgtgtgagaaggaaggactcatgctcctctctgaccctggctttggggattcacaggcaggtgaggaagttagagcattaaaacaatagccatgtaggtaagtaaagccagtctgggcccagggaaaaccaagaaaatttctaattactttattttcgaccatcagagcttctaagataaattaaaaattagactggagtcctacgagtgaattccgttttccaagtatcattgcactaaatctagacatgtacttcagcctgtgtgggtctggattgaacaccgagaaaccacgtgaggcacactcaggttctgtccaatgagcttaaataacttgcttgtgattggatttggcaaaatatgagatggatgttcacactgggagaactgtccctggtaaacactccagcttctaagatagaaatgcagccttcaaacccgtcttctgggtgtccttagagagaggttggtgtgttttacatttcttttaggtacatcacagtcatggtttacgtcaccagatcaaacaaatcatattctcattgctttgttttcctatcttttttatttggaagggaccgtccccattatggtctatattttggaagtcaaaataatattagtcttgaaattaaaatactataatatttcaactcaaaggcattggtaaagagataaatccaaaatatgcctcttttgatacagattttcaaagagaaaagtaccagacacaataatacctaccagtttggaggtgtcaatttccaattctccccactctctctgtgcttagtgacactgaacatttgtttcatagacttgctggccatctgtctgtcttcttttgggaaatgcctgtccaagttttccgcccattttaaaatcaggttgttttcttgcttttgagtgctttgacttccttatatattttggatattaaccccttatcaaatgcatggcttgtaaatatttcctccattctttaggtagtcacttcattttgtttattatttttattgctgtgcggacactgtttagttcaatggactttaatttgtctgtttgctttcatcgcttatgcctttggaatcatatccaaaacatcattgcccagaccaatgccaaaaatattttgtcctatgttttatcctagtggttttatagtttttggtcttacatttaaatctttaatccattttgagttgattttttatatggtgtgaaataaatatctgatttcattcttctgaatgtgaatatccagttttccccacatcatttattgaagagactatcttttccccgttgtgtgttcttgccacccttgtaaaggagcaactgatggtaaaagcgtggatttatctttggggtctcaattctgtttttgtctatatttctgttttagcactagtaccatgctgttttggttgttacagctttgtagtatattttgaagttgggtagtgcagtgcccctagctttgttctatttacccaataatgcttttgctagtcaaggtcttttgcagttcaatatgaattttagaattttttttctgtttcagtcaaacatgtcattggaattttgatagggattgcattgaatctataaattgctttggccatagtttcttttcttttttaggttgaataatattccattatatgcatatacccaacacttaggctgcttccattctttggctcttgtgaataatgctactgtgaacacaggtgctcaaatatctgcttgagtccctgctttaaattattcgggtattgaacaagagtagaattgctggatcatgtggtaattctatttttaattttttgaggaactcccatactctttgctgtagcagctgcactattttatttccaccaacaaaggaaattggaatgcacaagggttccagtttctccacatcctcaacaacacttcctaggagagtactggccatcctaatggatggtaaatgttatctcactggagttttatttgtatcttctaatgattattgatgttgaacatcttttcatgtgcttattggacacttctatatcttccctaaataaatattcagattttttgcccattttcttatcaagttgtcttttgttgttgttgttgctgatttataagagttcttaaatattctagatattagctccttatcaaatgtgtgatttgcggatgtcttctctcattctgggagttttctctttattctttgtttacagtgtcctttgatgcacaaaagttattaatgttggtgcaatctaattatctcttttaatttatctatgctttctttgattgcctttgctgtttgtgtcatatccaagaaattgttgccaaacccaatgtcataagtgtttccctatgttttcttctaaactttttaaagttttaattcttatgtttaggtccttgattcatttggggttaatttttatatatggtataaggtaagagcctaaattcattgttttgcaaccggatatctaattttcccagcaccagttgattaaaaaactgctcattccccattgcacggacatttctgattgaatcacagacttacatggcaccacataggccaggttttacttctgtgctctctggtgtattccattcatctgtatgtctctctttataccagtacagtgttttgataactgtggctttgccatcagctttaaaatcaggaaccatgagacttcagactttgtttatttgttttcaagattgttttggctagtcaggatcctttaagattacagaggcatttttctatttaaaaaaatgtctttgggatttgaatggagaatgtattgaatctgaggttcacttttggcaatattaacaccttaataacattatgccttccaacccataaatatgggatgcctttccatttgttggtgtcttcattactttcttttaacaattttttttagttttcattctacaagacctttgcatccatggttaagttcattccttagcattttactttttcatcctattgtaaatgggattgttttcttaatttctttttcagattattcattataagcagatagaaacaaaatttattttccccttctcccaatccccagctccgggtaacctctattctattgtctgtctctatgaatttgctttttctaggtgcctcatagaagtgcaatagtagaatagattaccttttctatctggcttcttttgcttagagcttaatgtcttcaaggtccatccatgttggaatatgtaccagaacattcttttttagagctgaattatattgcatttcatggatacatcatattttattcaatatttgttgatgagcactctgggttatttcaccttttggctattgtgaataatggtgcaatgcacatttacatgcaagtatctgttcgagtcccttttttattttttggaatacccatgggagtgaatttcctaggtcatatcataactctatttaactttcttatggaactgctcatctgttctccacagcgcctatacttgtttacattccaactggcaatgaaggttccaatttctccgcatcctcatcaatgtttttcttttctcctttttaaaatattatagccattgtagtaggtgtgaagtggtatctcattttgagggttttgtttgtttgcatttccccaatgattgatgatgtgacacatcttaccatgtgttaaggggacatccgtgtgtcttctttggagaaacttaagtcctctgcccatttttaaagtggattttttgtttttttgatgttgatgtgtaggagttcttgataaattctggacattaaatccttctaagatatatgatgtgtaaatattttcttccattctgtagtttgtcttttctcactctcttgaaaatgtccttcgatgcacgaaagttttttattttgatcaagtccactttatctttttcttttgttgtttgacagcagtgttttaaactccctaatgcatgatacaaaacaatcacttaccagagttatctaacatgtgctagttggggctggagccaccttgaattctcacttcagttctcacattgatagaaggaatggtttgtagctgtttttatatttttccagactccaggaggagggcttcctgccagttttccctcaaattgagtggaagccttgtcacatctcatcagtaaaaagacttgctcattgtgagggctgattatttctctgatgtgtgaatcttaagctgatgaatatcaagaggaaaatgtaaacccttctgccacaccacagtagaggaagccataactgcctaacccacagaaacaaatacattccactgcagcccaagagctgtgcactggcatctgcatacaggctggagacaagatggtcaggtgggggaaagggcagcaccccctgtccctatgctaacgaccaaatgagagtattggctgctgcagcactcccggatctgcagactagaaactgcttaaggcctcgcaccgtccgctcactggccgcatcgaactgaaatcaagctgggatgcagcacaggctgcttccgggtgctcccagaggggtggaagctctgtggaggcacagaagaggcaccgaggcactcgcctccctctccatggcctctgacaattttctgtatgttcccaaggtcttctctctcctccccacaaaaaactggagctaacaattaaagcaaatcctcacatctgtctaaatttactgatttaggtaacaaaacttgcagacctcagagactgtgaatttggagaagtgacttaaagaaccgagatgccggttgttattaccctggaagaaggggtgggaagaggagtctatgcagacagagggtggacttggcatttgaataaatgagatcatcacccaacagcccgattacaaaacgccattctttatcctttccaggatagaaagggcaaacatttcatactaatcgaaggagagattcttttgcaaagtgggtcatttttcttttccaggttctgtagagctggttcatgctaggaattaataaataccaaataacaaaatgttgttgaaaatggcgtctctccaaaaagatatgatcacctctattctttcaattgaaaaagattctaatgtgaaatatctctaatgtaagtgcatatgttcacaaaagtgagccagtacaaaaataaaatgtttgacataaatgtgatttgtctttctaaaattgaatggtagaatagtgacattttattattatttgcattaattataaaagcatcctaggtttgctattatttcacattttttcctaaatgggaaaataatttttccatctttttgttattaataattcattgaattaatgtgggatgttttgcacagggcaattacagtttattttcttcctaatttttttataacaaaatatccccattttacaggcaagacacctggctcaaagaaagaaattaaattattagcctaaattatagctgccatttttgatgtttaaattgtgccagagtttacgtgcagtatctcacttaattctcccaatagacacagactggggtttgccccaatttataggtgagaaaaccaagttttggaaacgtgcctttctgagacctttggctgccaagggaggatggcagctgagctgggtttgcaggagtctacgtgtgtctctgctgttggagatgctcacaggagtttccagatgaccggattcacctgtgatcctctgaatcttcccccttgaactctgtgctttctgtacacatcaggaagctcaggatgatccctttgttccccatgaaaaagggccacagctgacacccctacagcagaaacacatgttaacaagagagaagcagagaacatttattacactcacatgtgttcatggaggtcttgggaaatgtgaactcagagggtccagatggctgaggcccgaatgccctcctcacagaaaggaggagtggggttgctcagtcccatgctccagggagggtatgtgggagtgaaggttgtcttggctgcagacgaagtctcccaggtaacctccgggagctgccctcagaagaacagggggaaagtctgggcttggtggctgcctccagtctcttctcttctctggaggttgatctttcccagctgtttaatgagatccctggggaggcagtcttaagacagttgcatttcctttgaaagaagctttctcagtcaaatgagactccagtgagtttcttcctgcacttgggagagaaacaagacaaggctggagggaccttgattccgaggcagcttctggggccctcagcacatccatgtgccaggcttcagggagccacctgctgagacccaacaatgctctttttgtttcctaatttttatcgctttttttttttttttttgagatagggtcttactctgttgcccaggctagagtgcagtggcacagtcatagctcactgcaggctcagactcctgggctcaagccatcctcctacctcagcctcccaaagcactgggattacagctgtgcaccacctcacccagcctgttttattttcttttaatgaacaacatgctgtagcctgggacttaggtaattcagactctggaaaagatattttcctttaatatttaaaaccttcttgaggacctaattaatgcaaatcagagccttcgtagcaagtcctctgtgaagacctcagggcagggatctcactccttagacaaggccggtttcttgcttctggcttgttatgaattatgttatgattacatttgtctcttgagggtcctacatttcaaatagctcctgctctgtaggacagcagcagcttcctctcactgggacttttaatttgggaagcaggacatgcataggaagagtggactggcacttttccccctgttctgggcacgcctggcccagctctgtaggacagcggcagcttcctctcactgggacttttaatttgggaagcaggacatgcataggaagagtggactcgcacttttcccctgttctgggcacgcctggcccagctctgtaggacagcggcagcttcctctcactgggacttttaatttgggaagcaggacatgcataggaagagtggactggcacttttccccctgttctgggcacgcctggcccagctctgtaggacagcggcagcttcctctcactgggacttttaatttgggaagcaggacatgcataggaagagtggactcgcacttttccccctgttctgggcacgcctggcccagctctgtaggacagcagcagcttcctctcactgggacttttaatttgggaagcaggacatgcataggaagagtggactcgcacttttccccctgttctgggcacgcctggcccagctctgtaggacagcggcagcttcctctcactgggacttttaatttgggaagcaggacatgcataggaagagtggactcgcacttttccccctgttctgggcacgcctggcccagctctgtaggacagcagcagcttcctctcactgggacttttaatttgggaagcaggacatgcataggaagagtggactggcacttttccccctgttctgggcacgcctggcccagctctgtaggacagcggcagcttcctctcactgggacttttaatttgggaagcaggacatgcataggaagagtggactcgcacttttccccctgttctgggcacgcctggcccagctctgtaggacagcggcagcttcctctcactgggacttttaatttgggaagcaggacatgcataggaagagtggactcgcacttttcccctgttctgggcacgcctggcccagctctgtaggacagcggcagcttcctctcactgggacttttaatttgggaagcaggacatgcataggaagagtggactggcacttttccccctgttctgggcacgcctggcccagctctgtaggacagcagcagcttcctctcactgggacttttaatttgggaagcaggacatgcataggaagagtggactggcacttttccccctgttctgggcacgcctggcccagctctgtaggacagcggcagcttcctctcactgggacttttaatttgggaagcaggacatgcataggaagagtggactcgcacttttcccctgttctgggcacgcctggcccagctctgtaggacagcagcagcttcctctcactgggacttttaatttgggaagcaggacatgcataggaagagtggactggcacttttcccctgttctgggcacgcctggcccagctctgtaggacagcagcagcttcctctcactgggacttttaatttgggaagcaggacatgcataggaagagtggactcgcacttttcccctgttctgggcacgcctggcccagctctgtaggacagcagcagcttcctctcactgggacttttaatttgggaagcaggacatgcataggaagagtggactggcacttttcccctgttctgggcacgcctggcccagctctgtaggacagcagcagcttcctctcactgggacttttaatttgggaagcaggacatgcataggaagagtggactggcacttttccccctgttctgggcacgcctggcccagctctgtaggacagcggcagcttcctctcactgggacttttaatttgggaagcaggacatgcataggaagagtggactcgcacttttcccctgttctgggcacgcctggcccagctctgtaggacagcagcagcttcctctcactgggacttttaatttgggaagcaggacatgcataggaagagtggactggcacttttcccctgttctgggcacgcctggcccagctctgtaggacagtggcagcttcctctcactgggacttttaatttgggaagcaggacatgcataggaagagtggactcgcacttttcccctgttctgggcacgcctggcccagctctgtaggacagcagcagcttcctctcactgggacttttaatttgggaagcaggacatgcataggaagagtggactcgcacttttcccctgttctgggcacgcctggcccagctctgtaggacagcagcagcttcctctcactgggacttttaatttgggaagcaggacatgcataggaagagtggactggcacttttcccctgttctgggcacgcctggcccagctctgtaggacagcagcagcttcctctcactgggacttttaatttgggaagcaggacatgcataggaagagtggactggcacttttccccctgttctgggcacgcctggcccagctctgtaggacagcggcagcttcctctcactgggacttttaatttgggaagcaggacatgcataggaagagtggactcgcacttttcccctgttctgggcacgcctggcccagctctgtaggacagcggcagcttcctctcactgggacttttaatttgggaagcaggacatgcataggaagagtggactcgcacttttccccctgttctgggcacgcctggcccagctctgtaggacagcagcagcttcctctcactgggacttttaatttgggaagcaggacatgcataggaagagtggactcgcacttttcccctgttctgggcacgcctggcccagctctgtaggacagcggcagcttcctctcactgggacttttaatttgggaagcaggacatgcataggaagagtggactcgcacttttccccctgttctgggcacgcctggcccagctctgtaggacagcagcagcttcctctcactgggacttttaatttgggaagcaggacatgcataggaagagtggactggcactttccccctgttctgggcacgcctggcccagctctgtaggacagcagcagcttcctctcactgggacttttaatttgggaagcaggacatgcataggaagagtggactcgcacttttccccctgttctgggcacgcctggcccagctctgtaggacagcggcagcttcctctcactgggacttttaatttgggaagcaggacatgcataggaagagtggactggcacttttccccctgttgtgggcacgcctggcccagctctgtaggacagcggcagcttcctctcactgggacttttaatttgggaagcaggacatgcataggaagagtggactggcacttttcccctgttctgggcacgcctggcccagctctgtaggacagcggcagcttcctctcactgggacttttaatttgggaagcaggacatgcataggaagagtggactggcactttccccctgttctgggcacgcctggcccagctctgtaggacagcagcagcttcctctcactgggacttttaatttgggaagcaggacatgcataggaagagtggactggcactttccccctgttctgggcacgcctggcccagctctgtaggacagcagcagcttcctctcactgggacttttaatttgggaagcaggacatgcataggaagagtggactggcacttttccccctgttctgggcacgcctggcccagctctgtaggacagcggcagcttcctctcactgggacttttaatttgggaagcaggacatgcataggaagagtggactggcacttttccccctgttctgggcacgcctggcccagctctgtaggacagcggcagcttcctctcactgggacttttaatttgggaagcaggacatgcataggaagagtggactggcacttttccccctgttctgggcacgcctggcccagcagccctgccgatagggccaccctccaccctgcctggcgctggaactcctgagagccccccgcatccaaggatgtctctggaggcaggaagccccagtcctagggagggtagagggcaggctcaccctgaccacagggtgcacagctgattgtggtctcagtccccatctccagctctgatgtccggacttgctcaagcaggaagtcctgtttgttctgcacatcccacccaacctctccagtgccgaattccaggggcagccaggacatgaactggaggggcaagctccctccaacgcgggcttcagcattcacaactagaggaagacgaagaggatggcaacaggaaatcgaatgctgccaaatacttacaggtttattctgagccaacagagtgactgcgacctggggacacacagtctcctgaggtcccaagaaggtgcacctgaggcagtcgggttgcagtttggtttcatacatttcaggctgacagaatctcatgtgaaccgtaagtcagtgcatggagggtgtgcactgcttcagcctggaaaagtgggtatctccaagcgggggcttacaagtcataggtgggttttggggattctttagctggcagttggttgaaagagctaagctttgtctaaagacttgaggtcagtgggaaggaacactgaagttaagatgaagtcatctgcatccaccacgtcatgctgtaccagagtcagggtggaaagtcaaccacatcatacagattaattaaaaaaaaaatctgttcaaggggatttaatggtttgtagggcacaactccccaggccctttagaaaggaatttgggaaagaggaaaaaaaaaggtgagagctcagtactcggaacaggaaggtgaagcccttctagtcccagtgctaaccctacccaggtagcaccataacaggcaggggctctggtcccagcactaaccctacccaggcatcaccataacaggtagggggctttgggtccttgagtaagaagatcaaaacttgagaggggttagagctccagccagggatcctgcagggcagggtccagtagcctcctgaccagcctgtgggtcttcctggtgttaaggctcagcccatgaaaaccaaggagccctcaggcaagtcagaccccagctgaccctcaccagccctgcccagagactaggaccatcatcaaaccagggcaaaattggttttgaaagcactagtttacaaccactggttcttcttaaagaccacaacatcatctctcactccctgttcctctctgtcactctgaagtccctgtctctctccatgtcctgtcaggcccctgtctggctcccatcactgtatgtgtgaacccgtatttcactcctttctctccttggccaaggccatgtgagttcagcattaaggggtctgaatggctgcatctcgcccaaccctgggaagagaaaactagctcagaggagtcagctgtgtgaggtttgaagaatttatcagtcccagggagacatgaatttggggctgcagtcctgcactcccacacatgcacccttgcctggggcagctgtttaaaggcattgtgcccctgccctgctgcctcacccatcatcttcatgttcctggaatttgtgatacaaagaacaaagcatagccaatcaatcagtagcttatggtatttaatttagattttgggtaaacaactcagaaactgcctcttttttttttttaaggtccttttgtaactgcagctttttggagtgtatattcagggcaatttaaatctgtatccccgggttgcaactctcaagcttggctcaaacaaagtctccacatgtattaatttagcctcagattcttcctttaggttgacattcctatggcaacagccactggaccctgcctggagcacagcatgccctttatatgttttattctaaatgcaagtgtgcacggataatttgtaaaccaaaaataaaattctaaagccccccagccatctgaatggacttcctcctcagccagggatttcttaaaatttaacctgaaagactggttcaggccatgataggaaataagtgttgggtgtgcctcatgatgcctctctggcattaacatcaacatattctttaagtctgaaaacaaacattttacaacctattctctaaagcctactaccttaaggcttcctctgcaaataagaactgtggtctccacaatcctttatcttaacccagacattcctttctattgatcccaggtctttatatacactcaaccaattgtcaacaagaaaatttttcagtctacttctaatctggaagtccttgcttgtagttgtcccacctttctgaaccaaaccaatgtatttcttaaatgtatttgattgaagtctgctgtcttcctaaagtgtataaaatcaagctgtgccctaaccaccttgggaacatgtttctaggacctcccgagggcggtgtcacaggccatggccattcatatttgactgagaataaatttcttcaaatattttacagagtttgactcttttcattaacaaattgttgtacagttgaacagaaatcagcttaaactaatacttgtgcttctagctttcttacctggtgtatttctaatgaattattttctttaaaaataatcttgttatagcccagtgggttattcttgactgatgcacaaaacagccaatacaatgagacagcatgtgttacagcagagaaagagtttaattattgcaaggcaactgagcaggaggagacaggaggtacttttcaaatcttccttatgaagaattcagaggctaggattttaaaggatagtcttccggcaaggggttagacaatgggaactgctgattggctgggttggggatgaaaccacaggggtgatagggatgtccaaactgtctttgtgctctgaatcgtttcctggttgggggggtcactggtccaagtggcatcagttgttctactaaaatataaggtctgaaaaactatctcaaacaccagtcttagtctttacaatagtgatgttatctatggaggcaattagggaagttacaagtcttatgagcaccagctacatgactcctgagcagtaagcaagttaagaaacaatgactagttatgatttacctatgcagagctcttagcagaattcaggttcctaccacaatgctaaccttgtggcccttcattaattatacaaaggcagttttggtccttgaacaagaacaggggtagctttgggaaggggctgttatcatccttgctttaaggttaaactagaagctaaattcctgtgttctgagctgggcctgtgcccaggcatgaacaaggccatcagcttgtgaggttagaagcaaggtggggtcacttatgctacttttctcaccttcataagtttcacaaaggcagtttcagtctctcttgtatgttaagtgccatccagatgccagggactgtgctgggtactgtttatgcatgattgcattaatcaccaccaagccccaggacacaaacagtgtaattaccttcagtttgttcatcgtgaacctggggatgagtgtaagtatcttgcttagggtaaaagaattattaaacatagaatcaaagttaagcttaagtcatctaagactcacagcccgcccaggctcaggtcttgtcaacatttggaaatgattatttctaaaataatgaattataagctttttggaggggataacaacttataatgtctgtttaaaattttaatgtttttaaattaaaattttataaacaacaacaaaagaagtatgcccatttaggaaatcggatggcctcagtctcctggccttgctatcacccccccagtgccttctacatttcagacattgcatccccctccctgcgatgcctattaggataattatggttttttaatgtgtggtgattcctcagaaaatggtcaggggaactgactctgcagagggagaaggtggttcttcctggaaagcggaacttggatgtaaccacattagttcctgctgggctttggtcgaattaatttcaagcctttgaaagaggagggaaagtgtcactgtgtgaatggaggtctggaaggaggttgccctgcaacacagcttgccccgatacacgtgcaaatgtgttctctgcctcttagaaaagctaccagattgcccatttatttatgattatccattgtactaatctgtatggtgcttcttgcaggagtttggcaatttataaatcacagatttttccagcaaggacagccggatgctgtttctgcacatgtgctttgaaatataagcacactgtcatttgctggcattgatgacttgagtgaaggctgaggttttggctcagagaaacatgatgaatgttgacgatggaaagggaacagtgattgtaagaagtctattttattaaatgagaaaatagaagtgtaaatgccaacatgcttccaaaaaaagatatatgaagttttttcagctgtcattattggaaaagaaaaagaaaagaaagaaaagcccaacaggctataatgactagccttacgaaagcaaatgatattttgagtgaatagggacatgattgacttgaattgatgcctgattttcatgtttttgttaattatttgtaagacaaaattatcagaaaatgtcttcccaattccttaatatgtttattcctacttttactctcaatatcaagtttggaatgggtaaaattctacaccatctccccacgaaattgaccttgttcggccgataagtgtaggagttatttatctttgtcagaacttggaaatttccaaataaaatatttatacaagcagaagaaagcaggcccacagttctcttaatttccttgttttccctctcttagtgtatgtctacctgactctggagctacggtaaagtgcaagcactgtgctttgtgaaagcagctttccaaagagcagggattcatctttaaaatatgtctctggaggcacaggaagaggcaagactgatagattcagagttgtttgcacaagtcagatgttttttaaccttctggcaagataataatgctgagggtataaataacatttatgaagatataattccattatttgctgaaggggaaacggtggtttaaaaacctgagtcaaaggaacaccaaggaaagtatcccaggaggtaaatcacggagtaacctgttcacgattacagagaacactgccaaggaaggtagatctttgaatctaacccgacgaatctgaacaggtagaagaaagagggcacttgacccaacaacttccaaataagattggaggcacacgggatgtgaacggagtcctctgttgtcatctacccactcggccgcatccagccgggctcaacagcctgggtttgtttctctgtcaccagttgtttctgccattctgggggaaaagcacctgctcatttacactgtttaccattgaagccttcatcccactgctctgaagtgtctctgacctggttgttccaggaacgccaacccccatggtggagaatgctcaccccaccctctctgccagcccacgaggcgctttcctcctcattgacctgccctctggcatgccctcaccctccctggactcttgcagcccctcctgagggaaagtcctgtactcagtctttccctcatgtctcatgatggacagctgtcctcaccccatggacatggttcggtgtcttccagccgacctggaggtccctggccctgcagagtggtaccagcagagtcccctctctgacagtccctgcacagccccacagggtgaccatcgctttctaactcactacactcgtgccttggttcctgcctttttctggaacctcttccacccacaccatgcccaactgtaaaaatcatttactcctccaaggtgcaatgaaaatgacgagttgcaaccaaagccatcttctgctcaatcctcctggcacctttagcttcctgactgtgtttggggtaccggcctctcctctcctcccctctgctcctttcaaatgggatgccagcccctctgcctcctgagctcctttggactaggatgcaggcccctctgccccctgagctcctttggactgggatgcaggcccctctgcccattgagctcctgggcacagtgaggctgggcctgtgcaggcctcctcctagcagctgggccccgtgtcaggtttgagcacacagttcagcaaccctgcgagtgtaaactcagtaggtcagggtggagcctgagattctgcctgtccaacagcctcccaggaaatgctgtctctgcaggaccactccccataaagcttatgagtttattcttgggcattttgtaatatggcgacctcatagtttcaaggttctgaaatcttcagtgagtgaaacagctggtcccactgggctaaggatcagattctacttcaagtgccagtcttgcaacacattggccttgtcaccttgcacaggttatttaaatctctgttttctcatttgaaaaatgaggactgtatcacctacattttattttattttaccttagctttgaggctaaggatgccttattaatttgacaaagatggtttggtgaaaatagcaatgtctgctgggtattgatgttgtaccggaaaccttaccattctcatcagccacctcattcagtcaccacagcagttcagggggctcagtggggtcctgcctcacaaagacatcacctcccggctgcacagttgcccagcgtgttcctgtgctgtgtctggctcacccccacccagaaatccacatggtgcattttcggaaaactttccagccattatgcaaaaccactgggagcttgaaactggctgtggcgggagcacatatacctcagcagtgagcaaaggctgcacatcaggccccctccatccccaggacagccaggtcacctgtacaccacctcccgcccacagaaacagtgggcggaaggagcacgacctgagctccagggtgtgttcatatgtgagggctacagcctcatcgtataaacataaggaagtgcctggggccctggcttggactctctgcagcaccgcaagtgtggaattgagttccggggtgtggctgttcctcgtgattgttgcatttcatcctatacttcttgggcttattctaagacaaactacaaagcatcctcgcttattccaggtattcattcatgcattgaacaaccatctctttcaagtcttgctttgagggccaagtccccacagccacctccttgaattcacggggccgtcagtgacagaggagtggcctgcggtgaaaggcagcctgagttcagattgctgtggcccagtggaaacggttctcttcaatgctgattgacttcacctttgccccctttcccatagggccattaggtaatgattgggaaaactaagaacccaggatggctgctcatcggaggggccagtcatctcacagacactttgtgacaaatgtccagcagtttgtgcactgagacggaaaaatggaccgtgccgtaaggaggtgtgatttccactggaggagattgattgaggacatttggtaatattagcatttatgtgttgattgaaagtgtcactctggtgatagatggggcatgcctgcgcgtaaagagtgggaaagaaaaaacgttttctccggtgatgggtgacctcaccgttcacattttgacaagcacaggatagagcctcatggcgtcctaaaagttttacctaattagggaaaaattcagggtgttaaagcactcagctgttgaaaactgtgccaagatgtgggtcatatttaaaatcattgtttcagccaccgttaaatattaaaaaactttataaaaatctaaggcattaggacagatatattgcagaggaaaatgacagggctgtaggagttaggtgtgggggaagtggaagaacgccgggctggagctcagggactgggtgttccgtggcagagcggctgcctgagttccctgagcctcatctgtaaagtggatacgtttccatgggggaagtggaagaccccgggctggagctcagggactgggtgttccgtggcagagcggctgcctgagttccctgagcctcatctgtaaagtggatacgtttccatgggggaagtggaagaacgccgggctggagctcagggactgggtgttccgtggcagagcggctgcctgagttccctgagcctccgctttctcatctgtaaagtgggtacgtttccatgggggaagtggaagaccccgcgctggagctcagggactggctgttccgaggcagagcggctgcctgagttccctgagcctccgctttctcatctgtaaagtgggtacgtttccatgggggaagtggaagaccccgcgctggagctcagggactggctgttccgaggcagagcggctgactgagttccctgagcctccgcgttctcatctgtaaagtgggtacgtttccacctgaagggtgtcgcacattgcgaatgcgatcggctggagtgacgtgtgagaagagaatactttgggactttacagcaggttaaaatcttattttttcagggttggtaaatacctctgggtagacgtttcacaggcaacggggtctaagagccgggcggaagttctccctgtgtcacacaaggtcggtttgacttcaggcttctgtggcctcgatttcttcatgtgtgaaacagggaatgtatcgtcagcttgaagtgttgttacaagactaagtaaaataacatgagcagggccctggccaagccctacaacacatttcacaccgtggttcttattcatctctcaacgttagtgccatttataccttccactgtgtgacctgggaaatcacgtaatctttctggttttcgtatttgtttatgtgtggtaacaagcacatgacatgagatttactctcttaagtatttaggtgaagagttcagccgtgttaacgacatccacgttgctgtgcagctgatccctgcgcccctttatctcacatgaccgaaactgcacccgtggaacggcaactcccgtgtccccagctcctgcccctggcagccccatgctactcccccttctgagagattgaccctgttagattccatatataagtgagataatgcagtgtttgttctgctgtgactggcttatgtcacttatcaccgtgtcttccagcttcatccatgttgctgtcaacaataacagtgtatccttttttaaggctgaataacgtacctgcatacaccatacttctttatccattcttgctgttgactgatgtttaggctgtttccctatcctggctattgtgagtagtgctgtaatgaacaggggagtgcaggtctctcttggagatactgattccattttcctcggatgcattcctagagaagggattgctaagtcatctcgtggttgtcttttaatttttttgagaaacccccatactattcatagtagctgcaccaatttacctttccacccacaatgtgcaagggttgcagcttctccacaccgttgtcaacacggtattttctatgtggatgtgtgtttttacagcagttatcctgatggatgtgaggtagtgtctcagtgtggttttgatttgcatttccctaatgcttggtgatgtgaatgccttttcatgtttgctggccacttgaatgtcatctttagagaaatgtctattcaagtcccttgcgtattttgaaaatcaggttttttgttttttactattgagttgtaggagttatttatacattttggacattaacccctgattagatatggtttgtaggtattttctcctgtaccataggttgcatttacactcttctgattgtttcttctgttgtgcagaagcttttcagttgacgtggacccaaatgtctacttttgcttttgttgcctgtggttatggtgtcatatctgtgaaaatcagtgccaagatcaatgtgatgaatcttttccactgttttcttctagaaattttatagtttcaggtcttatgtttaagtcgttaatctattttgagttgatttttctgtatggtgtaagataaaggtccaattttattcatttgcttctgaatatccagttttcacagcactatttattgagagactgacctttccccactgtatagcgttagccctttgtggaagatcacctgacaatgtaggtataagtatatttctgggctctctattctgttccattggtttatatgtgtctttagtaccataccattgattactgtggctttgtaatatgttttagagtaaggaagtgagatgcctccaactttgttctttctcaacattgccctagctattcaggattttttgtggtttcatataaattttaggattttttctatgtctgtaaaaatgccattgagattttgatggatgttgcattgaatctatagatcactttgggtagtatacacattttaacaatattaagacttacaattcattaacgtggttttttttatttacttgtgtctttaatttcttgcaatagtgcattatagttttcagtgtacaagtctttttgcctccttggttaagtttattcttaagtattttacttgttttgatgctattgtaagtgggtttttttttttcttaatgtctattttggatcgtctgttgttagtgcgtagaaatgcaactttattgtgtgtatcaattttgtcttctgaaattttgctgaatttttgtttattagttctaattttttagtggaatctttagggttatctacatataagattatgtttctacagagatagttttatgtcttcattttccaatttgaatgtcctttatttcttttcttgaccaattcctctggctaggatgtctagcgctgtgttgaacagaaggggcaaaagtgggcataatcttagagaaaaagatttcagcctctcaccatagagtatgatgttagtcatggacttttgacatagtgcctttgttacgttcgggtaattttcttctattcctactttttattacttttataatgaaagactgctgagttttgttgaatgcttttcatgagtcttaaaatcatgtgatttgtacccctatgtcccagggataaattccacatatttgtagaatatgatccttttcatgtgctattgaattcagttgactagtagtgcctttgattgctttattataagggcaactgtggccttacataatgagtttggaagtgttctgtcctcttcagtttttgaaagaatttgacaaagattgatgttaatttttctttaatgtttggtagaattccccagtggagccatctcttcctcatttttcttttgttggaatgtttttgattactgattcactctccttcctagttagtggtatgcttagattgtcggtttcttcatgattgactggtaggttgtatgtttctaggaatttatccaatttttttctaggtggtctaatttgttggtatataattgttcacagtagtctcataattgtttttttcttctgtggcatcatttatgtcttctctcatttctgactttgagttttctctatttttttcttagttatattagtgagcttgaatttctattttaaataaaataccatggtgtaaacaacagacatttatttcttatacttttggactctgtgaaatcaaagatcaaggtgctggtagattcagttcctgaggatggatttctttctctattgcagatgttcactttttttctgtgccctcacatgcagagacagtgagcactcaggtctcctttcctctacttacaaagactctaattccaatagcggaaccaatcctcatgccctcatctaagtctaattatctcccaaaggtcttactccaagtatgattttattgtagtttaggacatcagcatatgaactttgggtgaacaaaacattcagtccgtaacattagtctagttaaatattgctgatcttttcaaaaaccaactcttagttttattgagttttgctattgtttttatgttctctctttcatttagttctgctccaatctttattttttttttgtactaactttgaccttagtttgattttcttatctagtttcttaaggcataaagttatttggtttatttgaaatcttttttaacataggtgtttaccaccataaacttccctcttggcactgtttttgctgcatcccacaaatttatttatgctatgtttttgttttggtttgtctcaagatattttctagtatccctcttgatttcttctttgatccattcgttccccaagagtgtgttgtttaatttccacatttttgtgctttttccaattttccttctgctattgatttctagcttcatgcttttgtagttgaagaagatactaggtatgatgtcagtcttcttatatttgttaatatgtggcttgaagtctatggcctgtcctggagaatgctcctgtacacatttgagaagcttgtgttttctactgctgttagatggaatgttctgtatacctgttcagtctatagtgttgttcaaacttgttttcttattgttcttctatctggttgatctaagacttattaaaagggtgatactgaactctgctcctattgttgtgttgttgtctacttctaccttcagttttgtcaatgtttgtttcatacacaggttgaatatgccttatcccaaatgctttggaacagaagtatttcattttcagacttttttttggatttttgaatatttgtatatccataatgacatatcttggagatgggacccaaatctaaacaaaaaatatatttgtttcatatataccaaatacacattgcctgaagataattatatatagtatttttaaaattttgtatatgaaacatagtttgtgttcaccgaactatcagaaatcaaaggtgtcaggtgtgagttttctacttgaggtgtcatatcagtgctcaaaaagatttagatcttgaatcatttcaagatttcagattttttgattagggatgctcaacctttatttaggtgttctgatgttgggtgcatatttatttacagttgttctatcttcctggtggattgattctgttttcattataaaatatttttctttgtctcttgtaacaatttctattttgtctaagtacagccaccctgcccttttgtttgcatgagatattttattccatctcttcacttttggcctatgtgtgtcttgaaatctaaagtgagtctcttgtacacaacatatagttaggtctcaatgtttttgttgttgtctatttcaccactctaatttctgtggatagagaagctgagactcaaaaataatattatttatcagcacatatgatggctttttacatgctgggaaagatgactgcttttacacaacatcaatatccttaaattgcgaatttctatttaggttctagtccaccaataaacccactgccatttttggttatgtgcttccataaactaatctttattttatttctttgcatgttttttctctttcattagaatgctgcctttctgtagtaatattgagaaacattttactttgtccatatcttctttccatttaacaatattaccaaaaacaagcaaacaaagaaactaaagctcaatttattcaaccaaaaatggttatttatcttcatttctttacatttaagggcactgaacaaattctatcccatttttcccataggaaaaaaaaaagtacattaaatgattgaaagaagttatctgtattcattttctatcgatgcttaacaaattaacacaaatatagtagattagagacacacatttatcctcttacagttctctaagaacttgtctcttagggctaaaatcaaggtgttggctgctttctcctgcagcctctgggggacagtctgttttcttggctttcccagcatctggaggctttgcccttgtgctctgagctcacctgtgccagaaagctccagccaccgcagctttggaagcatgcctccctctctgccctcagagtggaggatcttgtatgaagcctggatcaccagcccagcctgttcaggagagctctctctggggtgtgttccttccagcagcacagcttagaaggaaggtatagggtggaagttcaaaaggatcaagatatttttatttccagaaggttattggactctttgtgcactggcacctgccacaacaagtgaggggaagctccttgccttttctatttcccttatatttgtgtgactaaaagaggctactctagtgtttttaatttccttttcttaaaaacacaaacaaacaaaaaaaaagtctgtccctaggggattttctttccttctcactcagacagaagcagcaaacatacggtgtctgatttcacccccctacatccagcatcatacacagatgagcaaacccttcactcaggaaggggatgagtgatttttctttcaatatttgtagagatggagtctctaaataagagagcagtgtctgcttggcctaccattggagcctgattctgcataacgattccagtcacctgcgtgtcccagtggttttttgtcttacttaagagagttcttttggagatcccacccacaggctctgaccttatggaatattcaaagctgatgcagtccccagcgctgtctcttccattccactagcatccatcaactcagtcagctcagacacagccctgagcagtaaactgcgtccttggggcctttggtccaagcctcagtgctttttctagctttgccttctgtgcttcagccactggattcagattccattgtcccatctgtgggggccaacgtgaagctttaaataaacatgtaaacatcttttatttgttacagcctgtgacattatgattacatcattctccaccaacaataagaaaatttacattacaatgatttgtcccattgagtgtgtagcacgaaattctcatggaatttaataaatggtcatcaagttgacccatttaaaaaaaaaaactcacagaattttgaaaaccacagcatggcaaatcattattggagacagacagtgcaattaacacagtgaggtggctgagaagttccacaatagcaaaagtatcccgccttcttcaatctacttttctccaaatctatgcaaacaaagagtgtttaaaaaatataactttttaatatcaaacacattttgggaaatgctgctgtgttgataccatcacatttcagtaaaacttccatgaaagtcaccgacgctgagcatttcagtagaacttccacgaaggtcaccgatgctgagcatttcagtagaacttccatgaaagtcaccgacgctgagcatttcagtagaacttctgtgaaggtcaccgatgctgagcatttcagtagaacttccatgaaggtcaccgatgctgagcatttcagtagaacttccatgaaggtcaccgatgctgagcatttcagtagaacttccatgaaagtcacggatgctgagcatttcagtagaacttccatgaaagtcaccaacgctgagcatttcagtagaacttccatgaaggtcaccaacgctgagcatttcagtagaacttccatgaaggtcaccaacgctgagcatttcagtagaacttccatgaaagtcactgatgctgagcatttcagtagaacttccatgaaagtcattgatgctgagcatttcagtagaacttccatgagagtcactgaggctgagcatttcagtagaacttccatgaaagtcactgatgctgagcatttcagtagaacttccacgaaggtcaccgaccctgagcatttcagtagaacttccatgagatacaccgatgctgagcatttcagtagaacttccacgaaggtcaccaacactgagtgtttcagtagaacttccgtgaaagtcaccgacgctaagcatttcaatagaacttccatgaaggtcaccgacactgagcatttcagtagaacttccgtgaaagtcaccgacgctgagcatttcaatagaacttctgtgaaggtcaccaacgctgagcatttcagtagaacttccacaaaggtcactaacgctgagcatttcagtagaacttccatgaaggtcaccgatgctgagcatttcagtagaacttccacgaaggtcaccgacgctgagcatttcagtagaacttccgtgaaagtcaccaatgctgagcatttcaatagaacttccatgaaggtcaccgacactgagcatttcagtagagcttccatgaaggtcaccgacactgagcatttcagtagaacttccatgaaagtcaccaacgctgagcatttcagtagaacttccgtgaaggtcaccgacgctgagcatttcagtagaacttccgtgaaagtcaccgacgctgagcatttcaatagaacttccacgaaggtcaccgacgctgagcatttcaatagaacttccgtgaaagtcaccgatgctgagcatttcagtagaacttccatggaagttaccaatgctgagcatttcagtagaacttccatgaaagtcaccaacgctgagcatttcagtagaacttccacgaaggtcaccgatgctgagcatttcagtagaacttccacgaaaatgactgacactgagcatttcagtagaatttccatggaagtcaccaacgctgagcatttcagtagaacttccatgaaagtcaccgatgctgagcatttccatagaacttccatgaaagtgaccggcgctgagatggaatgactcctgtgaaaccctcacaaaatggaccccccccatgaaagaggaaccatgaatatttacctgataacaagaagtaccacaaaagaccctggcaacaccacaagctgcacaaagaccactgcaaccttgtgcaaagacaagtcttctatgaggacacaagctccccttgctattgatccttgtagccaaggataacggtttcaaaacaacttctgtaacctcctcactttgcctttaagctttcctgaatcccagcctctttggatatccctataatctcttatagcacatatgtcccagcttgcaattgcctacatagtcccaaataaactttgggagagcctctctctgtcattgtattaggctgacactccctaacccaacatattggactgttcattccacactgtttcctgcacagagagccagcaggtgccctttcctctgcaggtggaaacacatcagcccatgaccgacatgtgaacacaggtgaggagtgcagcgagggatccatacagggtgtccccagcttagaactcaacacaagtattttgttcaaacaaaatgtcaaaatgtgatttcaatcagctctagttaaaaattcataattcaagatagccttgctggtaatacttggttagaaaattaaccagaccagagatatcatgactcagcttttggctgaattgaagatgttcagtgaaatgcccacaggatgcttgtttattcagtatctggatcatgacataatggattgagtattgtttcataagctttaatttcattcctggctttcagtactactcattgagttttagtgtggaatttagtggtgtgaccgatttcactgctagctagtaatttcttttattttctttttttttgagacagagtttcactcttgttgcccaggctggagtgcaatggcacaatctcggctcactgcaacttccgcctcccgggttcaagtgattcttgtgcctcagcctcccaagtagctgtgattacaggcacctgccaccatgcccagttaatttttagtatttttttttttttttggtagggacagcatttcaccatgttggccaggctggtgtcaaactcctaacttcaggtgatccatctacctcggcctcccaaagtgctgggattacaggcgtgatccaccatacccagccattgctagtactttcaaagattatgcagtgtaacttcaacttatggtaccaaaaactattgatgttgttttgaatatgtgcattattactggtagctgtttggcttcttatttctgtgcattgtgctattattggatacatcttgggaacttgtaaagcaattttcagtttctatgtataaaaccaaaaccctggccgggcgcggtggctcacgcctgtaatcccagcactttgggaggccggtgctggcagatcacgaggtcaggaaatcgagaccatcctggctaacacatgaaaccctgtctccactaaaaatacaaaaaaaaattagccaggcatggtggtgggcgcctgtagtcccagctacttgggaggccgagatgggcggatcacgaggtcaggaggttgagaccatcctggctaacatggtgaaacaccatctctactaaaaataccaaaaaaaaaaaaaaaaaaaaaaattagctgggtgtggtcacaggcacctatagtcccagctactcaggaggctgaggcaggagaatggcgtgaacccaggaggcggagcttgcagtgagtggaggttgtgccactgcactccagcctgggcgacagagtgagattccgtctcaaaaaaaataaaattaacccaaaaccctgaagcatgaatgatatggtcattatggctctttttctccaaaagtccctttaaagctcagtaattgctatttggaaacacatacatacattgaattacaatatgtgctaagtttgcaagaaccttgtgtttcttctagaaagctacttggttttttttttttcctctaacagggataagtcaaaatgaataaaagattttgagtacagtctcacgctttgggtatgattggcgaatccagcttgaattaaagtttaacacaagggctgggcaggccctgggttccactcatgaccagagtgagggatgctggttaccaagtgtaatgacgctttatgaaactacctaaagactatgaagctttggcaggagaatacacctcaacatcttgaacattttgctcatcacaatttgaaatgatcaaaataattagtgttgtagctgtcaatgttaagagtcattcacatgcataggaaggaacttaattcaaattggaataaaggaaagatgaagcctttggttgcagtcactaggaggttgggggcagctcccagcatgttggtacccaatgtcccccagtgttctttgtgtatccctgcatggggtgttcctctgtgttgaagtcctcttccggcaggctggctcgctggctctccacttggcattagtggtattagaacaagcttcaggtattcacttctcacagctggtcacaccaatgtaggcatcttggcctccctctccctgtcatctgtaccaagctgccactgggctctggctggtccagctgggtcctgtacctattgcaagagagaagcagtttctaaaagaaaggcatgcagagaggaccagggagaggccgaggggacttcatgctgtcagggaagtttgaagtcatttttgagatgtcacgtctttgagttataaagaaaagcagctccgaaaagctgagatggatgttattggggagggagggctttacccggtgatgtgtgacctccaatcctgcctggggccccattctccaccccctcattctgccatggaatgaaaatgaccaagatcctgcctttcgagagcttaaaggagcatgtctgtggaactgacaggccttagcgttgctcttcttcttgaaaatgatttatctttctttctggtgtcatctcagcagtttagaatatgctagaattttggtgagatttagaaaataggatgtcaatcaattagcagtcacctcaaaataaattttattttcttcattttattgaattttgttatgcaaacaaagaagaaagacaacattagaagaatgcacttagaccttcttttctaccaatagaatgggggtggcaggacggcaagattcgtattttaccatcaaaaacaggaagatgatttttccccagtaactgaataacttctaaaaacagtttctttaacttctgtgtcagctttggggttcactgtggacttttctgttgatttgacacagggactttatgtggggcagtttgtggagagaagatgaaccttttgtgggtcatttttgcttttacaggacatttagtgtctgtaacatgcggaggtaaggatccaggagtttgtttcagtttttttattgggagggggtaggggtataaccgtctctctaggaaactctccctggggcaccctttcctgctctcccgtagccatggggacagggtgggtgaacaaggcccctcctcgcttcccgccgtgctgtgcacactgcctattctgcgccacacagcaggcgctgttcctcccaagcgtggccttggcatgaagcccacacgcacccacacagcaggcgctgttcctcccaagcgtggccttggcatgaagcccacatgcacccacacagcaggcactgttcctcccaagggcggccttggcatgaagcccacacgcacccatacaaaaggcacggcggcctgagacacaatggctagttctgccaactcacacagcacaggggtctgctgcgacgggatccacatcacaaaatcaccacaggtgctgggcaggtggggaagactgagtcctggcccagattacggggtctgacttaatcaagacccatcactgaagatgcaaaataaaggaagtgagcattagcccccgttaggtgcaagaaaacaagtaagttacattctcagcgttgtaataaaaaatacccagtatattcatgtttataaccaatttggatcatgatttggatcatgttactctgccttttactttaaaccatacatatttcctgtctattattatttttttggagggactttcttggagttcacaaggtccaaactttgttaaatatttttgtaacgtgttcttccaacaattataataaacacttgatctgattttctcctccaggaactcgagttccaggacctgagggctgtcctgcactgcatccactccttcatagcagccaaggtggcctccgtggaccccggcttcatggacagtcagagtcttgccagaaaatacatgtacagcagctaaaggttgtttctgttgagtgctgaaaaattaaattattttcgtaagaaatgattctttcctgcagaatattgcaactttgtgttgttttatgatgagcctatagttgtgataccaataaaacatgtcactagtttccaaagacgggtcctccttgttaaatctgacatgggggatgcctggtcccctcttcccatgagtctccccccaacgaggagccccagcgtcccccacacaagtctgtggctcagactccagtccacctgatgcagttcacgccccagcccgcatcccagcagcatgagaaccatgtgggcattgcacatgccacttcccacgttggcaaaacccagatttattttcataaaatatgtcatcgaaaattctgagcgagtgccacgtttctcctcaggaaggaaagggtctcctttgcagtgggctgtcatttcctttttcctccagtggggatcagagtgacaggagtatttgagaaacagggattggtcaaaatatgtagggcaaggaaatcaactttacttaatattataatcttattacatatcaatcttcatgcttataaatttatcatactttgaataacatatataaatatgaattttaattattttcctaattcatcaaatattagcatgcagtttagtttccttgtttctcatattgtttatgacttctgagtagggatactttacatttttgttattaatggcaattgactggagttgcttgaattttttttttagagatacagactctaggtagaaaaataaggattaggcactttcttgacaaaccttcaaataaaggatgaacataaaaccatcaatctataagtataggaaagtaagaaacagatgccttctcctgcagttctattgaaaagaaaatgtgggccaggcctggtggctcatgcatgtaatcctagcactttgggaagttgaagcgggtggatcacttgaggttaggggttcaagagcagcctggccaacatggcaaaaccctgtctgtactaagaatacaaaaattaactgggcatggtggtggacacctgtaatcccagctactcaggaggctgaagcagaagaattgcttgtacctggagggtggagattgcactgagccgagattgcaccactgtactccagcctgggcaacagagcaagactctgtctcaaaaaaaaaaaaaaaaaaaaaaaagtgcagatgctaaaggttccatgttccatttcatgaggtgatgaagatctcagcaaaaatccatagctccccacattgcacccgccccttgtctatctgacattaggaggagggaaatattttaatataccaaatatttacaaccaatagttttatgtgtttgaaagtatatcctttttagaagaggtacatctctatataataaatattgcatgtgctatgacgttttgatggcttctgtggaagactccagtagggagcagagtatttcaagtgaatttaaaataatattctgccccatgaatgttgttcttggggcgtcagacagtatttttctgtctcggtgttcattctctggctttaattcaaacttcctattaatactaatagcaataggagttagaattgtacaaaatatataaaacc

SEQ ID NO: 570 - DNA, 600544 bp, Homo sapiens
  source 1..600544: mol_type = genomic DNA
cacgccattctcctgcctcagcctcccaagtagctgggactacaggcgcccgccactacgcccggctaattttttgtatttttagtagagacggggtttcaccgttttagccgggatggtctcgatctcctgacctcgtgatccgcccgcctcggcctcccaaagtgctgggattacaggcgtgagccaccgcgcccggccaatccatcaccttttctatctccactgccaccactgtagacaggcaccatgtcttgcctggacaactgcaataactccttaaccacctgctctttctccaccctgcccccattataattcattctcatcccaggaagagccatttttgttgttgttgttgttgagagggagtctcactctgtcacccaggctggagtgcagtggtgggatctcggctcactgaaacctctgcctcccgggttcaagcaattctcctgtttcagcctccccagtagctgggactacaggcgcacgccaccatgcctggctaatttttgtatttttagtagagatggggtttcactatgttggccaggctggaatcgaacttctgacctcaggtgattcacccaccttggcctcccaatcatgccttgggattacaggcatgagtcaccgcgtccggcctaggagccatatcttaaaacctaattcagatcgtatcactcctctgcttgagtcctttttttctttggtagagaacggcgtctcgctacgttgcccaggctgctcttgaactgctggcctcaagcgatccgcctgcctccgccctcccaagtgctgggaccttcctagaattaggcagaaaagcccaaactccttcctctggcctgcaaggccctccctccacctcctcaatctccttttctcactcaccctctcgaactcctgacctcaggtgatccgctcgcctcggcctcccaaagtgttgggattacaggcgtgagccaccgcaccaggcctattttctcactcatcccctcgctcctgtcaacccctccaggcaggggccttgcaattgcccctccttatggaacactttccctggggatcttcccggactgggttcctctcatcatccaggtctgggctcagaagtcgcctccttagagaggccctccgggattgcccatccgcctgtgcccacgctttgtcccgttcctctatttttatttcctttcccgctcgcatccctctctgggacgaagtcgccccatcactcgtgggaacctcaggaaggcaggggaggcgtcttgggcacttggggacagcgacgcctcctcgcggggtctcgggtttaccctgagtctccagcccgcgtagcctcagcaccgctctccacaccgggtccggcgacttggatctgcgccgcggtttacgttccgggtcggcgggcggggcctcgtcggcggccaggctctacttccggggcggggcggccggggcggggctcctgtctcccggcctgtctggagctcggcagccgcagaagcggcagcggcggcggcgcggcgcaggcaccggcccggggagaggcaccatgagcggtgagtggcggccccgccgctgtcacctgccccggccgccccggctcccgccgctccagctgcacactccggcccctgcgtcctcgcgccccgctccctcgcagaccccctcccagtcgctcccttttccagacccctggcccccaggactcccggctcgtggcccctgctcacctgcgggtctctgatctcccgtggcggggcactcctggtctcctgactcctgtccatccataaaaaccagctcctaaacccctgtccccagttgttccagtcctgcgatccccttgcctagtgtccagacccccagttctgagacctcccaggtctcagtctctcctaactcctagacccgctgcgtcccagctccagttccaggtcccccatccccagtcatccccgctacccaggcccctggtctccagtccctgcagtttccacacaggcatagtctttctggacagttagtttgctgaccccagtacccccgtgtcccaggagcttctggtccccagaggagctcaattctgcaacccgtttgtcttccccatccctctcatccctcccacccctgttcccagtgctttgctcttcccatcaccagttcttcccagttacccactcggcttccctctccggtcctggcttttacatttcgatgatccttgcatattccatccttgtccatgtcttatcctggctcatcattatcatttaagatctctcttgccttgtcctgcagcccttcccttcttgtcccgtgcccagcccatctggggaccgtcacttcgtccttcttcttcccagtccaaacttcttcctctcaccatcgagggggtggtgttgatggggatgctggaagtgagagggaggtgggtgtgggcagctcgtcctcaatgttttctgaagtttagtcccttgactctaccctcctttcctctgaggagtcttattggtgttttggtgctaagtcattcctgggtgttgtatgtggagatgggagtgactcagggaagcctctcagctctcccctgactgtccagccactctgggatctggatttatttaggaagccccgcctatcctcctagtgcctgttttcccctcactgtggaattgtttctgaggatccctgcatccagccgtcctggccgttgtcttccactcaggcatttctggaggttgagcggggggcaaggccaagggatactgctgtcttcaattttaacttttaaagttatctctgtggaccttttttgttggttggttgtttaaacaagtgatgtgccttttgtttttgttattcaagggcaagatttgtgaaatggacagtcctaataatgagggggctggtgagggggagtttcctgggagataatccacctttggttgcaaatcaaatgattttaagcctaagtatggtttctgattcgtgaatgttagtaatacctcagtaaagatgttatgagctggcttcccccaggagctgaggtaggttggtgtaagtgcaggccctgaggccagacatcctgggttcaaatcttggccctgccacataaacctgtgttatttaagagtaagttctcgaccattctgggagtcccagcaaaatgaggatacctagtagtacctatctcctaggcttgtaatgactaaataacattcatcagttaaagtgactggtactgtgaatatcacgaggtgcattgtcagaatctcagagctgcctgctgttgtttctgcaagagctcatgtggggtaggagtggggttgtttttgcctagttatgagaggagggctgggactaggcactgtctgaaaatcttttccttttactatgaccaaggagtctttgccacaagctcacagttctggacccttttcgttttacctttagcacaagagacaatgaaattgataagccaatagaaattgatcagtttatctttcaaggagaaataatatgaaaactctggtggcacgcgcctgtaatcccagctacttgggaggctgaggcaggagaatcgcttaaaccccggtgccagaggttgcagtgagccaagatcaagccactgcactccagcctgggcgacagaacaagacttcgtctcaaaacaaacaaacaaacaaaaaaacaaaagaaagaaaactttaaaatttaattaaaaaatcattacgtctgctgggtgtgatggctcacacctgtaatctcagcactttgggaggcagatgcaggctgtcacttgagatcaggagtttgagaccagcctggccaacatggtgaaatcccatctctactaaaaatacaaaaactaacagggcatagtggcaggcgcctgtaatcgcagctactcgggaggctgagggatgagaatctcttgaacccaggaggtggacattgcagtgagcggtgatcatgccactgcactccagcctgggcaacagagtgagactcagtctccaaaaaaaaaaaaaaaaaaaaaaaatcgttacatctaaagccaaagagaaaaggaaaccaacaaatgactttttaggaaaaagcattaaggatgaaaaccttcttttggaaacattgtaattgaggcagaaaaagtggtctgtgaaaatggaaggggaagtccaacgatatattttgtttcttgagaatgcagttgaaagtgggtttccccacttgtggggtgggtaactggtacacgataaaataaagtggcatggaaatatttcctctttcttctgttccccacttataatattttgtttatttatttattttatttatgttttagagatggagtcacgctctgtcacccaggctggagtgcagtggcaggatcttagcttactgcaaccttcgcctcctgggttcaagcaattcttctgcctcaggctcccaagtagctgggactatagacatgtaccaccatgcccggctgagttttgtatttttagtagagatggagtttcgctgtgttggccaggctggtctcgaactcctggcttcatgtgatccacttgtgaactcctggcttcatgtgatccacttgtgaactcctggcttcatatgatccacctgcctcagccccacaaagtgctgggattacaggcatgagccactgtgctccggccataacattttattttatagtgtattttaaaaactcagaatctaagtaaggtttaaacagtgcacattggtttgtgttttaaatcttttaggtctctccctcacctcctgtttattttatttttattttttggtattttcagagccgtgtaaacatcaccatagttaatttcacaacattttaattaccttagaaagaaactttgtacccattagcagtcattcatctttccccctcccctcagaccctgggaaccactcatctactttctgtctctggatgtgcctgttgtgggtatttcatataaatgaaatcatacagtatgtgacctctcttatctggcttttttcactcggtataattttcctgaggttaaaccacattacagcatatatctgtacttcattcctttttgtggccacattatattcctttatgtggatatcatattttgtttattcatgcatcaaaaatgggcatttgagttgtttctactttttagctgttctgaataataatgctgctatgaacgttcacgcacatgtttttgtgggggcaagtctcttcatttctcttgggcatgtttgtaagagtggaattgcagggtcatatggtaactgtttaaccatttgaggagctgtgtcagactgttttctaaagtggctgcaccattttcagttctcaccagcagcatatgagggttctgtttctccacaccttccccaagagtctttttaatcatagacattctagtgagtgtgaagtggtatttcttcgtagttttgatttgcatttccctagtgactagtgatgttgagcatcttatcttgtgcttattgaccaattgtgtatcctccttggagaaatgcctcttcagatcctttggccattttaacattcggtggtctttttattgctgatctataagaatcctctgtaatttttagatactagtcccttatcaggtttattgtttacaaaaattttctccccttccatggtttgtcttttcattttcattttctttttttttttttgagttggagtcttgctctatcacccaggctggagtgctggagtgcagtgagaaatctcgtctcactgcaacctctgcctcccaggttcaagtgattctcctgcctcagcctctggagtagctgggactacaggtgcacacccccacacccagctaacttttttgttgtttcagtagagatggggttttgccatgttgactgggctggtctcgaactcctggcctcaagtggtccgcctacctcagcctcccaaagtgctgggattacaggcatgagccaccgcacctggccaatttttgtattattagtgttgatggggttttaccatgctggccagctggtctccagctcctgacctcaattgatctgcctgcctcagcctcccaaagtgctgggattacaagcctgagccaccatgcctgggctcttttcactttcttggtggtgttttttgaagcagtctttttttaaactacaggctgccctttaatctctctccttttcccccttgcatttgttgttgaaggaaacagagttatttatcccaaggatcctttgcaggcctctgctgattgcatccttttggtgtggcataaagtgtttttcagtctcttgtatgtgctataaattggtaattagagtctgctgtatttttgagttgaaaatatttgagtagagtcagaggagagatgggtgcaaagctgaatacattaagtacaaataaccaggcagtggaatggcgctaggtaatatatatatacaagataaatgggtatcatgaggccagaaacaactaagatgaccattaattggggagtaggtaaacctagtgtgctgtggacacctgacggaaagcctcagaaatgttaaaaggattgatacggattcatacacatcaccgtggctgcatctcaacgttaatgttctgtaagaaaagcagggtgggtctggcgtgattgctcacgcctgtaatctgagccctttgggaggcccagttgggaggattgcttgagtccaggagtttgagaccagcctgggcaacataacgagatctcatctcaattaaaaaaaaaaaaaagcagggtgtagaattatacctaaaatatataccttgatgcaaattaaaacatactgaagacaatatttatggattcatatatgtatgtagacctaaaaagattatcaggaagaaagatgcctgccagacatgtgtgggtggttattgtagggtggtggtcacaatttgtttatttttctttaaagaacccagtagataggaatacttgattgcccacctcttcagactatgtaaggaatgctgattttcagatatgtgtttgttgttactgggaaagtagaactcgtagagccagaaagtcattatactcaagttttgtcttttgtaagtcttcatccttaagttcctggatgctcctttccatcagtttttttttttttttttttgttttgagatggagtcttgctctgtcacccaggctggagtgcagtgatgcgatctcggctcactgccagctctgcctcctgggttcaggccattctcctgcctcagcctcccgagtagctgggactacaggcgcttgcaaccacgcccagctaattttttgtatttttagtagagatggggtttcaccatgttagccaggacggtctcgatctcctgacctcgtgaaccacctgcctcggcctcccaaagtgctgggatcacaggcgtgagccaccgtgcccggtctccatcagtaaaggagacactgagattcctgtttcaagggtgaggaaagccaggcccatagtgatcaaacaatttgtgtaacagatgagctctaagattcatcatatatcagagttttgggcttaatgggtaatttactgctgtttcttgcctgacgttaatgtatattttggcagctttttattaaaaaaaattttttttaattaacgaatatttttttgagacagattctcactgtgttgtccaggctggagtgcagtgccactatcttggctcactgcaacctctgcctcctgggctccagtgattctcttgcctcagcctcctgagtagctgggattacgggcgtgcaccaccacgcctggctaattttttgtatttttagcagagatgggttttgccatgttgtgcaggctgatctcaaaattctgagctcaggtgatccacctgccttggcctcccaaagtgctaggattacaggtgtgagccactgcgcctgggttacaattttttttttttttttttttttgtagagattgggtcttactacgttacccaggtttatctggtactcctggccttaagccatcctgtctcaaccttccaaagtgctgagattatagttgtgagccactgtgcccagctgctttttcttagttttctggaatgttgaaggtcacagttttctcctcggcactgactgggccctctctgacagtagcttgtacttagaataaataatcagctgaaatgaatgaatgaatgaaaaaagaatatttgtggttttcattcaaagtagaaaagtgatgctatcaacattttttcccccttgtgaaggcactggattgatctatgatggtggaatgcaagaagtacatgttctaccatcagcaaacagttgacccccacctctgctagcaactggcgatggactaggtcctactgatgttggctatcttgcctcctggttgcttgactccaggtaactgataggaactcaaatgcttagagctcttaaaatttggaactaaaatccaagattttatagatttctccaaattgtggcaatgtgagcatatttccagataaagcaccttccatctgccactgtcttgtctatacataggccgtatatttgcagtgggggtgatatcacccccaagggggtgaacactggttctcaggagagaaaaaaaacttacttggatgtataaagcacagataggcatatagtacataaacagatgtacattgtatctgtggtattactttttcatggaggggatgattagcaaaaaagtgtctaaaaagtgtccttagggggaaagaatgaaaaagattgagctggacacagtggctcacacctgtaattccagcactttaggaggctaaggtgggaggatcgcttgagcccaggagtttgagaccagcctgggcaacatagtgggacccgtctgccggtctttgtacacacacacacaaattagctggatgtagtggtgcatgcccatggtcctagccactcgagaggctgggctgacgtgggaggatcacttgagcctgggaggttgaggctacagtgagccatgaaagtaccattgcactccagcctgggtgacagagccagacccctcagaccctgtctcaaaaaaaaaaaaagaaaagattgagactgatataggctgcagtaattgtattattatcatacaactttgcatcttgctttcaccattaacatttcaggacaaaactttaccacattgctccatgggctcactattgatcacttttatggaatgtacagtccatcattcatcattttgcatgtagtacaacttttaactattgattctagttgtagaaacttagcctatcttcctctctccctctcctccctctctccctctctctctcccttcctccctttcctctctttttcttttgagacagggttttgctctgttgcccaggctggaatgcagtggtgatacaattatagctcactgcagccttgatctcctgggctcaaatgaccctcccacctcagcctcctgagtagctaggactaaaggtgcgccaccacacccgtctaactttttcatttggtgtagagacagggtctcagtatattgcccgagctggtcttgaactccagacctcaagtgatcctcctgcttcagcctcccaaagtgccaggattacaggtgtgaaccactgtacctggctttccttctttcttttttgtttctgttataagtaatgatgcagtgaacatttttttttcaaggtagttttccatcccttagattatgtctgtagggagattttccaaaagtagcattaacatcgaagagtttatcacttttgattccttttttttttggcctataattaaactcagttgaattgatttgattttttccaaagtggttgcactagtttcaatgctgctagtaagaataagggctctggtggaagcagaggttggccagaaatttggggttcaacattcagcaaacattggatgatagtttggtgcatcctctatcacttatcaaaaggttgttaccactggggtctgttgaagcaaaaggatgttgttgggaccgtgctgagtgtgttagccagggctcttttcagtggaatgtggcagaagctgatgaaactgatttcaacagcatgggaatatatggtgtcttgtaatggaaaagtctagacatagggctggcttcaagcttagctggatccacgtgttaaaggactatcaggattatctttctgtctggctgtcaactcgtcttttctctctgttggcttcacccacaggcagccgctcctccatggagcgggctggccatgtggtcatcctgcaacccatcactgtgattttggttggccaggtctggaccataagtctagtctggagcctgtggctgggagtccatcctactaaattgtctggatggaggatgaacttcaggggaagggctgctgtaattttggatggggtggttaggaatgtgatgtggcagcagaggcttcctgaggcaggtggctcctaggttttcttcctgagcagctgaaaggggttggaattgccttatctttttttttttttttttgagatagagtcttgctctgtcacccaggctggactgtagtggcgtgatcttggctcactgcaacctctgtctcccatgttcaagtgattctcccgcctcgagcgccaccatgcctggctcattattgtatttttcgtagagatggggtttcaccatgttggctagactggtctcgaactcctgacctcaggtgattcactgacctcgggctcccagcgtgctgggatgacaggtgtgagacactgtacctgaccagaattgccttttcctgaggtgggagagccagtaggggagcaggttaggtgggggctgagcagtttgaatcctgcaaggggagtgaggactcttttccttgccctgactttttgctgtccgggagcccttcagagacctggcactagtgtttcctctgctcacccaggcagtaccccgcttcctccgaggagggaaacttgcccactccatctcatttttcttcgcttgcatctgtgtttcttggaatctgctctttcctcctacaacttaaaaaaaaaaaaaaaaagcgaaaacccaaaatgacattaaaaactattgtgaaaacagaatatacctttaaatatacattcctggcacatttaatatttaaatttgtaggtattcctcttctgcctttgttcaaagcatacactatatatgcattttgcataattgcattgtatctccgtttgagcgtttctgcttacatgatagcacttatccacgttccttctcttcacgattctttgaaaaggcagcatagcattccaccaaattgatgtaccgcagctatttaacctctctcccattgcaaaagacagtcaattccatttatggtgttctaggataggattggtaggcgtttcctgtgaagggccagatagtaaatattttctactttgtgggccatctggtctcagcctcaagtattcatttctgctgtcgtagtttgaaggcagccacagaccatgggtaagtgaaaggacgtggctgtgttccaataaaactttatttagaaaaagtcagcagctggatttggctcgggggctatagttgactgacccctacactaggacactgcaatacaaatcttcgtgcccattgatgctcaggaagtcattgtgttattacggaaaagcttcggatacagacaagttctggatttaactccctattgaagaagttgggcagttttttgttttctgtcttatttttttgagacaaggtctcactctgtcacccaggctggagtgcagtggtgcagtcatagctcactgcagcctcaacctcctgggctcaagtgatccttcctcctcagctccccaggaggctgggactacaggtgtgtgccaccatacctggctaatttttttttttaaattttcatagagacgaggccttactatgttgcctagggtggtcttgaagtcctgagcccaagcagccctcccaccttggtgtcccaaagtgctggagttacaagcgtgagccactgcacccggcctgggcagatttttgaacttctctgacttttactcttttttttttttttttttgagacagagtctcactctgtcacccaggctggagtgcagcggtgtgatcactgcaacctccacctcctgggttcgagtaattctcctgccttagactcccgagtagctgggactacaggtgcgtgccaccacgcccagctaatttttgtattattagtaaagacggggtttcaccatgttggccaggctggtcttaaactcctggccttgtgatctgtctgtcttggcttcccaaagtgctgggattacaggcgtgagccagcatgcctgattctgactcttactcttaattcccttttcagaaaatggaaattaaagcaagtaatgaatgtatagtgcgtttctcaggacctggaacatagaggaccaggtgaaattgttatttgtatcttttctcatttcccctgttcctttttagcttaatttccaaggtgtgaaaagggattttgatttatttttgtagcttttgatatgcattgccacatcgcttttcagaacttactgcacccatagattgttaccagtggtgtgtacttgatttatcatagctttaccagcattggggaatttcactttaaatgtttcttggaggctgggtacggtggctcatgcctgtaatcccagcactttgggaggctgaggcaggtggatcacctgaggtcaggagtttgagaccagcctgaacaacatggtgaaaccacacctctactaaaaatacaaaaattagctgggtgtggtggcgggtgcctgtaatcccagctactcaggaggctgaggcaggagaatcacttgaacccgggaggcagagattgcagtgagccaagatcatgccactgcactccagcctgggcgacagagtgcgactccatctcaaaaaaaaaaaaaaaaagtttattggttaatttgtagttacataatggtgccatgtggtagttattaataggcatataatttgcatttctccaaccaggagggaagatattctttcttttttgagataggattttgctgtgtcactcaggttggagtgcaatggtgtcatcagtgctcactgcagccttgacctataggctcaagtgatcctcacacctcagcctccctcatagcttggactacaggtgtgtgccaccacacacggctaatttttaaaaaactttttgtagggacggggtgtcactgtattgcccaggctggtctcaaactcctaggctcaagcaattcccttgtctctacctcccaaaatgccaagactacgggtgtgagccaccatgcttggcctattgtctctttaaagtttttgtacattgccatgctagtgttttttttttattttgttttctacagcaagaactggtgaactgggttggcctcctgttttgcaaataaagttttattggaacaaagccatttctattcaattactgttatctatggttgctttcaggctgcaatggcagaattgagtaactgtgacagagagtgtatggcctgcaaagcctaaaatatttactgttttgctctttacaggaaatacttgccaatccctgctctagagtaatttttttttttgagatggagtcacactctgtcgcccaggctggagtgtagtggtgtaatctcagcttattgcaaccttaacccctttgggttcaagcgattttcctgcctcagcctctcagtagctgggattacgggtgggtgccatcatgcctggctaatttttgtattttcggtagaaacggggtttcaccatgttgttcaggctggtcttgaactcctgacctcaagtgatctgcctgccttggcctcccaaagtgctgggattacagacgtgagccatgatgcccggcctgctctagagtaaattgatggtccccattctttgctcatttattttgtctttgatcttagacaccataagcccacatggatggcccgagcccatctgtctgcatgcagagcctgtctctttccattgtgtgctggcagacagtctgtccttttgtcctgggccagctgtgccacttcaccctacaatactgggagacagcgccctgactttgggggagaacgattgtccattttatctgtgcgtatgctaagtctagagcagataaaaccaccaccgcactctgcccatgacaggaatgaggcagccgttgtgccctggccagttctggtcctttttatttaaagtagcaacttggggagccacagaagtgagctgcaccagaatctagattcaacaactgttgagttccttctgtgatgggagagagttcgtgaggcttctgtctatgtccgagagctcacaatgcataatccctcccacgatggggattacatcagcgctatggcaggactgcagggccatgggagcactgtgtagagggacagcagtgtgtcccttgggggaccctctgcaggaaggcttctctgagaagggaacgtttgagtcagccatcgggaggctgttttttctttggcagcactttgatgatgtagccctttttctgtgctaagattgagccattcaaggagtgagcctggttttgtggaggttgaagtgtacaaggtttggggtaaaatgtcaggtctgtcacctctgagctgttccttgggtaaatgatcaatgtctccaagtctcagttcctttgtttgtttcaccagggcggccagcccccaccttccaggtagatgtgagggttaaacgtatgtctcagtatggcggattggtggcgggcctggccccaggtgtgttgtgtttgtttcatgtcgagttggctggaacattgttctcacaagagtataattaggtgccaactaactgacataaaaaagctgggttttcagcctctcttgaaaaaccaggagatggggcaattgctggtattgctgtgaggtactgtctgctagagctggctagcagctgccatcttgagaggggcacctgctctgttcttgcaatctgtgccttgccagcccaacccgctcatttccatgcctcacctgaccccttgggcactgcgggggtccctcctggtcttgtatgtgccccgggcatatattgggcagccctttctgcccccctcctcctttgcttctgctttctttcagtttctttatttggaatggttgtggattttggggggtgggatgggagttaaacaatagcagcaacactaaagtcatcattgggctggtagcgccgggcatcccagatgcccgccagtgtaactgagaatgaattctgcagtgacaacaggttgatgatgtccttgttccctgcaagactctgtatgtggggccttggttagagggcaagggaagatgggagcatgattatgatgcgggcctggtctacagcctgctggggaactctcacgtttaaccatctaaccgcacggtggctgtaaggtctacaaactccgacactattgttttaatttttaacctgccagccttcattatttctgccagggcagtgggctgttaaatccagcccaagacctgttcgttacatattatctatggctgttgttcacactgcagtggcagagttgggtagtgacagcaaccctttggcccacaaagcctaaaatattgactgcgggactctttccagagaaagtttgctgacccccattctagggtatgctaaaggtgtaggttcagtgaaaatcagaaacaaatcatgtgaggcagcccgccacagatgcacacgcagggcttagagaaatgctgtgttcattgcagttttgcagggcacattggatgaatcacataacatcattgtgtgtatcctgtaatactagtaagtcatttattgtgtattcatctgcccttcccgatgctctagccactgcatagataattcagtgcagggtaaaggaaatgagagcaaaagggccagagctaggaacagcaactgaggcaggggtggctgtcacagagggcctttgccgtgagacttgccgtctcatgaaggaagagccatgccaggcagggggagacaggggtgcaggaggggcccgtggaagcaaggcatggtttctattacatttattcattttattttataaaaatataaatatatgtaaatttatttatttattttttatttcattttattttattttgagatggagtctcactctgtcgcccaggctggagtgcagcggtgtgatctcggctcactgcaacctccgcctcccaggttcaagtgattctcctgcctcagcctcccaattagctgagattacaggtgcatgccaccacctgaggctaatcttttttttttttttttttttccagtagagatggggtttcacacgttggccaggctggtctcaaactcctgacctcaagtgatccacccactttggcctcccaaagtgctgggattacaggcatgagccacctcacccagctgggagtagcttttctattgtgtgattcaatatggggactgggttctccatgcagttgccttgtctagcccttgggagaatcctactgtagttgttccttagaataggaacattttctcagccaacatctacctgttgcagtccttctcataaaaatattgggccaagagtggtagctcacacctgtaacctcagcacattgagggactgaggcaggaggatcatttgaggccaggagtttgagaccagcccaggcaacatagcgagaccctgtctttacaaaacgtacaaaattagcccagtgtggtggtgcatgcctgtagtcccagctacttgggaggctgaggtgggaggactgcttgagccctggagttggaggctgcagtgagctatgatcatgccactgtacttcagcctggttgacagagccagactccatctcttaaatttttttttttaattgaggtgaaattcacaaaacaaagaattaactgttgttctaaagcaagcagttcaggggcatttagtacagttgcattgttgagcaatcagccctctatctagtttcaaaacattttcatcacccaaaggaaactccatatccattaagcagtagctccccatccccctaccaccccagcccctggcaaccacctgtctgccttctgtctctatgaatttacctgttctgtccttcccagttttgcaagcacggctcaggttcccaattgttcagtgagcttgccctggtccccaccaggatgacagtgtggtgtgtggaaggaacacttgcctgagagttagggagagcagggctcagcctccaatgcagcacctgcttgactgtgtgcccttgggcagaattcctcgcacacagtgggcactcaaagagcattgccttctttttcttttctcgcttgtacctgcttaatgtgttacaaggatctcaccagggaaatgtctagcatgacgtcacctccaccgctgcatggagagacagcgaaataccactatttaaatatctgcagggctgggcgtgggggctcacgcctgcaatcccagcacttcaggaggctgaggtgggtggatcacctgaggtcaggagttcgagaccagcctgaccaacatggcgaaaccccatctctactaaaaatacaaaaaaaattagccaagcgtggtggtgggcacccgtaatcccagctactcaggaggctgaggtaggagaattgcttgaacatgggaggtggaggccttagtgagaagagatggcgccaccgtactccagcttgggcaacaaagtgagactctgtctcataaataaataaataaataaataaataaataaatatctgtgtggccttgattaaggggcttgacctctgtggaatgggaaccagtttacctggagctccagggttgcgagggttaaagaaggaatatagccggagtgcctggttgcctcctgcttgttttctcctccccacgtgccaggggtcctctttcaccctttcatctcccagggcagcaaacacagaggcttggattgaattgctttgcctgggctttggagagaaggtagctagttgaaaggacttctgggagccagaggtcttgataccttggggtaagggttgccaacaatgatgataatgatagctaattttattaaatgcttggtatataccaggcactgttctaggtgcacaatacaatttccctcattttatcgtccgaagaggtaggttctatgatgagcctgaaggagggaggttaagtaacttgctcatgatcacatggctggtggagtaggattctaacccacactatcctgttcttaatttctgctctttctctccaggaggtcactgtagcttgaatggtgaccccaggcagaaggctagagatttgtggtaaaaattaatgtaggatccaaaggactctaaacattaaacattagatcctgagagttctaaacattgaagacaaaggccgggcgcggtggctcatgcctgtaatcccaacactttggaaggccaaggcaggcagatcacctgaggtcaggagtttgagagcagcctggccaacatggtgaaatcccgtctctactaaaaatacaaaaattagctgggcatggtagcaggagcctgtaatctcagctacttgggaggctgaggcaggataatcgcttgaacccaggaggcagaggttgcagtgagctgagatcgcgccattgcactccagcctgggtgacaagagcaagactccgtctacaaacaaacaacaacaacaaaacattaaagagagacccaactaggtgactgactttcccgtgcacatgaggattctgagtagagttagggagtgtcagctgactgcatttctcagacaggtttgtggacccctggaggtattcccttgggtgcctttccattttctgttttcattttgatggtgatctaaatgagaaataaaaagaagcctgttcttgttcacctggttgactgctggctgggggctgcccctggagatgaggaagcaggaacatggggtttgatcgctcctgtgtggcaaagtgtttgctgaatttgcactgggccactgctgcaggttgtgatggaggtcgagggtgagcagggcttagcagctggcagctccaggatcccatggacttggaaatgtatccctcctcggccacttcccatgagtctagccctgggtaaaggtcttttcctctctgagtcacagtgttctctactgaatggaaccacttttccttctttgtcaaggattaaataggtcatttaatgacttagcctgtggttgggattcggtaggtgggcacattgttcctacttctctctgagtggcggcaacatttgaagctggcagattcttctgggccctggcggaggtgctgtactctccactggattcaaagggagaaggtaagaaggagactggtagcattgattgctctgcctgcctgtctctgcagagtctccatagactgtagagctggaagggcatgatctcatgcagaaaccagtggccagacaagggaagtgactgtccctgtcacatggctagcaagcaggccaggcaggatgagagctcaggccttgtgacttcccgttcagtgctctccactgttcctctcagttgataagtggtcctgagaccacctgtgctccttgcagcctagtaaacccccttctctcttatttatttatttttgagacactctcactctgttgcccaggctggagtgcattggtgcaatcttggctcactgtaacctccgtctcccaggttcaagcgattctcctgcctcagccttctgagtagctgggactacaggcgcccgtcaccacacctggctaatttttgtatttttagtagagacggggttttgccatgttggccaggctggtcttgaactcctgacctcatgtgatccgtccgctttggccccccaaagttgctgggattataggtgtgagccactgtgcctggctgacccctttctcttaagctcattcagggctaagttggccacagctgccccttctgaggtcaagattatctcacttgacagcttcttgcctgcagagagatcacagccaggaagtgtgagcctctgggttgagacctgcacaatctcgggtagtttttgtataaagaacaggtttttcttttcttccccccccaccccatcatgaaaagaggctttgcagagtaaggcagaggaggctgctgacatctcatccagaataatcagtagagcaaaatactcttaaaaaaaaaaaaaaaaaagacatcgaggatcattgtgcataccaggaagggtaggtgctaaacctttattattcaggtgtgaaaggagccggcagtgtcagctccactggaagcttacgagaaacacagagttggcagggcacggtggctcacacctgtaatcccagcactttgggaggccgaggtgggtggatcacgaggtcaggagtttaagaccagcctggccaacatggtgaaaccctgtctctactgaaaatacaaaaattagccgggcgtggtggtgcgtgcctgtaatcccagctttttgggaggctgaggcaggagaattgcttgaacctgggaggtggaggttgcagggagccgagactgggccactgcactccagcctgggtgacacagcaacactccgtctcagaaaaaaaaaaaaaagagttaggccccatcctcaacctcctgaaccagaacctcccttttgggctgggtgtggtggctcacacctattatcccagctgtttgggaggcagaggcaggaggatcgcttgagtctggggtgagaccccgtctgtataaaaaataaaaataaataaattatctgtgagtggtgccctgtgcctgtagtcccagctactcggagggctgaggcaggagagtcgattgaacccaggaggttgagactgtagaaagctatgattgtgccacttactctagcccatgtgatagagatcctgtctcagaaaaaaacgccaaaaaataaattgctgctttttaacaagatctccaggagatctgtgtggacattaaagtttgagaagcactgcattaaaaaattatcactagggagatgaaagagatttttattttctttgtacattttttcctgatttgttattattctatttttttcctgcatgaattgcttttatgatgagaaaaaaatagcaaaggcatttccagtgcggggaaccctgtcaagtttccagttggcattgctcaagggcaggtagagctgtcgggctcactcatacttggaaaaaggaagaaagcaagcctaactttttttctattctggtgttagggagggaagatcagaatccaaaccctggattctgaaacaaagagcgtttgattgatagacacaggtgtcaagaggtgttggaggaccttggccagatgggtctatagccatcctgagcgatgccttgagatgcctcatggctggtgggaatggtgcctaggctattcttgatcgaaacctcttccagaaaaaaatactaacggtactttttgaagagtcagttgttttattgtgtgtctcaaagaatctgctgactggtttcattaccaggcctgggggtaaggcaggatccttggtattgtggtcctaacacaggctttagaggtcttgagtcaggatcactgttccaccaattagtattcaaatttcaacagtctaacccctttatcatggcccacacgatcctatgtgactgacatctgcccgcctgtttgatctttccttccacttttttgctttttgctcaagccacagcaaacttccttctggtcctggaagaccagagccaagcttgtcctacctccgagcctctccccttgctgtttgctctgtctggaacactggcctgccctgtctttccatagctgttccttctcttcatagagggctcagctcaaatgtcacctgtgcagagaggccctcagtggctgccttggctaaagcagccttcttgcttcctccctatcccatcactgtgtttgttttgtcttcctagtgtgactctctaacactttttcattgattagtttacatttatactttttttttttttttgagatagggcctcactctgtcactcaggccagagtgcagtggcacgatctcagctcactgcagccattgcctcctgggttcaagtgatccttccacttctgcctcatgaacagctgggaccacaggtgtgtgccaccacgcccggctaattttttgtgtttttggtagatacagggcttcatcatgttgcccaggctggtctcaaactcctgatgtcaagcaatcttcctgcctcagccttccaaagtgctgggattacaggtgtgagccactgtacccggccttctagtaggattttagctccatgagaagatggatcttttacaccatttaactccggtgtcctcagctcttaaaacattgcctcacatacactagaagttaaataagtcctgggtggatcaacacacacaatcacttgacttccccgagcttcagctttcccatctgtgtttgggaacctggcttatagggtgaatgtgaagatgaagggagatgatgcatgcatagtgcttagcttggttcctggcatgtaggatgcgcccagcacacggtggtggttgttatcaaccagctggccctggcttgacctggaggaatcactgaccacctctgagataatgccctgctgctactctctggtgcagcccacgtagagttgcccaagacagaagcagcctgatggcaattcaacgcctgcagtgtggagcgtctgcccttagaaactgaatttcagtatcctttgaagtgaatgtgctctgtgtctggtgcatcatactccgggctttgtatcttgcttggagtcattgggcctcttgtggagatcaggtgtggctctaccaactgtctgcctggtgctttcaagtgctcttgccccagaccttcctaaatggaagttcagcatatgtcatgtgtgtcagttgggaatgcttttggatgcaagtaacagcccaatgtgcagtggtgtggacaaatagggttatttattttgtgagagttagcttgtttctagtcttggcttaccaactcagtgatatcagggctggtgtctttgtgattctctaggtctttctctcaggctcatgacttcgtggtggcaaaatgctactctggctccacccaacatgtttatgattaaggcatgaaggatggtggagggagtgatgctctgcatagctcttctttctatcagaaatgaatgactttcccagaactttgggagccacttctgctttcttctcattggccagactgcttaagttcaacctcagctgctgagaagaggagtaatcaggtttcacagcttggattgctgaaggtggcatgggaaaaggatgttggagatgatagtgagaacagccagtgagcagttcctgctgtactgggaaacttatattttattttaggctgctggttgacaactgggggcagttttgattcccaggggacatttggcattacatggagacatttttgttataactcaggggtttgtgtgtgctaatgccacgtagtgtgtagaggccatggatgcagctaaacatcttacaatgtcagtagtgccaagggttgagaaacctttagaccattctagacatgttcagatttggggaaaattagtttagctgttttcctttgatgcagtaacaggcaatagccaaacttcattgtaatgatacagattattgatacctagttgtgctactgattttgttaaagatcagtaggaaaggactgatctagttggggacagccgtgtccgagcgtcagagagaactaattaagcctcattgcattttaggatcacagaacaatgacaaaagacaatttctgctggagcgactgctggatgcagtgaaacaggtaagcagaaagcacacatttgcctttttggtcgagtaatagtgtcagataattaatgtaggtcatttcttccctataacatacacagactaactcccactttatacctgggaacagtgaagtgatctactcatttttcccaggaaatgatagagcagtgaacacggtcaaggttgggttggaggaagtcctgtgtcttgaattcccaaagccctctagaggaccccatccgtcagtgatgtcccttcaagaaaggcactgggccaggtgcagtggctcacgcctgtaatcctagcactttgggaggtcaaggtgaccggatcacttgaggtcaggagttccagactaacctggccaacatggtgaaaccctgtctctataaaaatacaaaaattagcagggtgtggtggcaggcacctgtaatcccagctacttgggaggctgaggcaggagaattgcttgaacctggtaggtggtagttgcagtgagctgagattgcgccactgcactccagcctgggcaacagagtgagactttgtgtcattaaaaaaaaaaaaagtcattgatgtgggtttcaaagtctcattgtctcatttccaagcagttgtgtttgagggcaactctgaggggtgcagaggtggtggtttggagttaggaccctcgagcacaagaaggctaggacaaggaggatggaggccacgcctgaggtcctctgctgctgcccccagctgtgtggacgctccaggtagctttgctgtgattgatgtgatgctgtttgtgatgcttgactccggctgggcttggaagtaagcttggatgtgagactggaatctgcttgccgcatgtaccagatgcatgctgctgttagctgtcactgatcacacctccactgtgtgccaggctctctgctaagcactttatatttaatccttctaacaacactgtgagattatagttcctacaattggtttcattttacggatgaagagactgaagctcagagggatccaacaacttgctcagggcgtcatagtaagaggcagagctaggatccaaatctaggaattctaggagcttgctttttggaaggggcagttgacggttataattatgtgtgtaattacactatagggaggtaagtattttaataggggtgtgtgttaaaatttttttttttattttctagagacaaggtcttgctgttgcctaggctagagcgcagtggtaccatcatagctcattgtaacctcaaactcctgggctcaagcaatcctcccaccttagcctcctaagtggctgggactacaggtgcatgccaccacatgtgccggggtgtacgttgagtattgaagtgagcccagagaatgcagtatctacgcaagccttgaggcattgtatggtaggaaggtcacaggcttttggctcagacgtagctggaattaaaggccagctttattacttctttagctctgtgtgtacagggacaactcgtgcaccctccctgagcagctctctgctcttctgtaactgggtcacttatctgtgtatggctgctgagggaattggattgttaaagtaggtaaagggcctggacagagcctggtcctctgttaacatggtaacatctggagcccatgttattagctggttctttctctgctgcagaaatggaaaatataataaggcgaagaggcaagttgaactactttaaaggtagcagttagagagaaataaagtggagcttatgcccagagctgctgctgtttttttttagatggagtctagctctgtcgcccgggctggagtacagtggtgcagtctcagctcactgcaacctctgtctcctgggctcaagtgattctgctgcctcagcctcatgagtagctgggactacaggtccgtgccatcacacccggctaatttttgtattttttagtagaggtggggtttcaccatgttggccaggctggtctcgaactcctgacctcgggtgatccgcccaactcggccgtcctaactgctgggattacagacgtgagccaccgcgcctagcctgctgttattattatcattattattattattgttattttgacggttaaagtgttgcatatgactttttttgcatgactttcaaaaataaactttattgatgtataatttacatataataaaatatagccatttaagtgtacagtttcatgtgttttgacaaatatgtcatttaaaattatatgtatatacacacacacatatacacatacacacacacagatacacacacacacattgtagtagttttgataataagtttaggaaccctgcaagcgtgctacccatagcagagatactatacctttaaaagaaaagacaagtaggccaggcacggtggctcacacctgtaatcccagtgctttgagaggttggggcaggaggatatcttgaggccaggggtgtgagaccagcctgggcaacatagtgagacccctgtctctacaaaaaataaaaaatatcagttggacctggtggcacgttcctgtaatcccagctacttgggagactgaggtgggagaattgcttgagcctaggtattcgagattaccatgagctatgatggcatcactccccttcagcctcggtgacagagagagaccctattttttttttttttaaagaaaattagaatagtggataatggtgatgattgcttaacattgtgaattgaaatttacacctaaagatggttaaaatggcaatgtttatgttatctatattttaattttactaattcaaaaagtagcctgcagggccgggcgcattggctcacgcctgtaatcccagcactttgggaggccaaggcggtcggatcacctgaggtcgggagttcaagaccagcctgaccaacatagagaaaccccatctctactaagaatacaaaaattagccgggcatagtggcacatgcctgtaatcccagctacttgggtatctgaggcaggagaatggcttgaacccgggaggcagaggttgtggtgagctgagatcgatattacactccagcctgggcaacaagagtgaaactccatctcaaaaaaaaaaaaaaaaaggagtagcctgcttctatttttcccaccctcagtaaattgtcattccgcacaaccagatgactcatatgaggcttgatttgtgctgttgtaacgtcatagccagtcatgacaactctggggctcgtccaaagggatccattcagcacaggcttatagaagttgtaattatcgcccgtgaagagctgtgtgtggtagacagtcagctgccgacaggcaggagcagcttcctggataatgcacagatggctgtgtgcttttgtttttctgttagcaatgttttcccacaaggcttgcttctgtacaagtgggagataagggtttcctttaagtggcagcttcaaggctggggtgcgcaccttcttaagtcttgtgctgatacccaggggacagggacgtcctcacttggcatgcagagcttctggtcccgtgtcccctccctgacccttaagccctgtgtaggctgttttatgacgttttgagtgtcccatcccaacagctgatctcagcagcttctttttctgtgcagtgccagatccgctttggagggagaaaggagattgcctcggattccgacagcaggtaaatatgtcacttctaaaaccgttgaccatcgaggttggaaaggcggcagaaggtggccggcttctaaaaccgttgaccatcgaggttggaaaggcggcagaaggcggctggcttctgggctctgcctctgcagccaagaggtgcagcgctgaaatttgactcaaccgtggactctgtgcggtgactgctcatctccaacactccacattttccataattctctttctaggaatctattctgagggaattattcgagatacctttccatataaagttattttcagggtaattaataattatgagaacttggatgcctaaatacccaagatttgggaaatggttaataaaatatagtgcattaatggggtggaatgttatatagccattaaaaatgatgtttatgtagaatttgttttcaacagaaaaatgcataggtagtgatttaaaaattacatatatagtaaaaaggcatatgttataacaagagcaggatccgaaattctatgcgtatggagtggtcctagctatgttagatagcacctctggccagaacacaccgaaacgtggcctgaggtagcagtaggggtaagaatactgggaatattgctttctagtatttttcacattttttattgtgatcatttgttccttttatgacaaaaataattcctaaaaatgggccgggtgcggtggctcatgccaataatcccagcactttgcaaggctgaggcaggtggatcacttgaggtcaggagttcgagaccaggctggccaacatggtgaaaccccgtctctactgaaaacacaaaaattagctgggtgtggtggtgcacacctgtagtcccagggtcttgggaggctgaggcaggagaatcgcttgaacccaggctaattttggggaaaattaagggtttaggaggtggaggttgcagtgagctgagatcgcgccactgtactccagcctgggtgacagagtgagacaggatgagactgtgtctcaaaaaataaaattcggctgggcgcagtggctcacgcctgtaatcccagcactttgggaggttgaggcgggtggatcacgaggtcaggagttcgagtccagcctggccaagatggtgaaaccccgtctctactaaaaatacaaaaaattagccaggcacggtggcgggtgcctgtaatcccagctacttgggagactgaggcaggagaattgcctaaatccaggaggcagaggttgcagtgagccgagattgcgccactgtactctagcctgggcgacagagcaagattccatctcaaaaaaaaaaaaaaattcctaaaaatggccattgacattcacgacccaggaaaggctgacatcattgcataagctgataacattggctggaaggagacacatagggcttggtaaaggtaggagacacataggcatccagtccttgctgcaaatgcgttgtgagctcagtcagagctgatccttgctctgtagcccctggggtggcaggagggacattcctgtgtgggaaggaaagggaagggaacttgcttgctcaatgttcatctcatcctggaaactgttcatgtcccccaccctctcaccctagcccaccctcctgtgtccatcgttcctctttctgtcctttcctacccttgttcttttgtagaattttaacagccatgagaaagcatgtagaccttcctggaatagagccacgtggatgatttgaaactggcacagatttaaaatgatgcaccctattatccattccttctttgcttaggttttctccattgcacgtattaccatccaacaaactatatatacattcggctttttaattttgcctattacctgtcactataatgtcggctctgtgcaggcagggatgatttgctgtcttgtttacagatgtttctctagtgcctagaagcatctagaaggtgctcagtaaaaatttgttatccggatgagcgtgtgtatcacattgtactgtagtcaagcatttaaatatgtgtgccaccacgaagcctgtaagatttgaaggcagaaagggtgtttctccatttatttttaaaattttacttctcagtgttgtacacaagcactttgtgcctgtcgtacattagattctcagtatatgtttgtggcattagatcattcgactgattgatcaatttagtccttcttgagggcctactatggggcctggccttggtccacacagggatccaaggtctgcttgcatcagaatcacctgggaggcttattgattaatgatcctgtgtctaagtcctgtcctagttgtactggagcaggatgtgtatatgtgcatgagtgtgtgtgtgtatgcctgaagccgaggagcttgctgagaatttgcatttcaacaggactcccaggtgattctgctggacaccaaagcttccagtgcaatcactgttccagggtctgggatgcaaaggtaattaggaaagactcctccttcctggccgggttggtttgtctgtgtgtatgggtgtgtgtgccgtgtgtgtgtctaagtatccatgacttcttgaccacttttcttcattaccatgctgtccacttcctgagagaggcaatcctgctctgaatgttgggttaatgtattcttacacgggtggagtatccctcatccaaaaacccgaaattcaaaatgctccaaaattcaaaactttttgagtaccagcatgatgctcaaaggaaatgctcatggaagccagttggattttggagttttggattaggcgtgcctaactgttaagtatataatgcaaatattccacagtcaggaaaaatctgaaatccgaaacatttctgatcctaagcattttggataaggaatactgaacctatataatagaatttactaccataacctttgttatagaaaatgttctattttatagtagaatttaaaaagttaattctttctgtgataactgttgtttatggctaaaaggagtacgtggcttactattactaataataggccaggcgctgtggctcatgtctgtaatctcattgctttgggaggctgaggtaggaggattgcttgaggccaggagttcaaggctgcggtgagctatgatcgtgccattgcattctagcttgggcaatagacagagaccctgtctctaaaataataataataataataataataatagccaggcatggtggctcacgcctgtaatcccagcactttgggaggctgaggcggaaggatcacctgaagtcgggagtttgagaccagcctgaccaacgtggagaaaccccgtctctacttaaaatacaaaattagccaggcatggtggcacatgcctgtaatcctagctaagcagggaggctgaggcaggagaagtgcttgaacccaggaggcggaggttttggtgagccgagattgcgccattgcgttccagcctgggcaacaagagcgatactgtctcagaaaaaaaaaaaaaaaaaagcaataataatagttatagtttgtgactacttttgctacattttatttatgttgattcctagtcctcagaaggagcagaagtattaccctttctttttttttttgagacagggtcttgctctgttgctcagcctggagtacagtggtgtgatcatggttcacatcagcctcaacctcccaggctcaagatcttcccatctcagcctcctgagtagctaagactacagatgcaagccaccatacctggctaatttttgtattttttgtagagatggggtctcactatgttgcccaggctggtctcaaacttgtggactcaagtgatcctcccaccttggccacccaaagtgttggtattacaggtatgagccacactgtgcctgggttatcccttttttactgatgagaaaacagattcagagaggcaaaatgccatagcctacgttagacgttttggaacggctagagttccatgacttgttctttctcccttgtgtgctatttagtgactaaatggtttttgaggctgagtttaaaaaaaaaaattattctcctctacctcagtgggattccttcttaatatcagagacctggtcttacctttgaaatgtatttgggtaaaggtggcaccaccttcatgttggaaaggccacatcattgtccctattctgtgagaaagttgaatctcggctggatgcagtggctcacgcctataatcccagccttttgggaggctgaggcaggcgaatcacttgaggtcaggagttcaagaccagcctggccaacatggcaaaaccccgtctctactaaaaatacaaaaattagccaggcgtggtggtgcccacctgtaatcccagctactcgggaggctgagacaggagaatcgcttgaacccaggaggcagaggttgcagtaagccgagatcacaccgttgcaatgcagcctgagtgagagagtaagactctctcaaaaaaataattaaaaagaagaagaaagttgaatctcaagagggaaagtcagcgaacatttaaaaataacttaggactgacaagatagatgagttgcctcccttcctcaccgctgatagctggcccggccctggagttgagctcaaatccactcacttccctccaactcctctcctggcccgcggtccccatcaccagcatctcacagcatggccgctgcagccttaggctcttcccattcgttcttgtcctgcttccaccacattgaatgcagaatgcagattccctcacctcatgctcccttgaaacctcccagctgccttgtctttgctcttgggagaaagacccacgtccttaacacagcctggaggcctcacatgccctgctctctgatccagccatctgccctttttctccttttgtttttaaagcttttcactactttttctttctttttttgagatggagtctcgctctgtcacccaggccggagtgcagtggcgctatctcggctccctgcaagctctgcctcccaggttcacgctgttctcctgcctcagcctcccatgtagctgggactacagacgcccgccaccatgcccagctaatttgtttgtatttttagtagagatggggtttcaccgtgttagccaggatagttttgatctcctgaccttgtgatccgcccgcctcggcctcccaaagtgctgggattacaggcgtgagccactgcgcctggcctgcttttcgctactttttcaaggaaatttttttttctttttttgagatggagtttcgctcttgttgcccaggctggactgcaatggcgcgatcttggctcaccgcaacctctgcctcctgggttcaagcgattctcttgcctcggccttccaggtagctgggattacaggtgtgtaccaccatgcctggctaattttgtatttttagtagagacagtatttctccatgttggtcaggctggacctgaactcccgacctcaggtgatcctcccgcctcggcctcccaaagtgctgggattacaggcatgagccaccgcacccggcctggatcatttttgacttacaaaaatgacagcttgttcaaaatagttaaaaacaatatgtttttcgtatgcctctcttttttaaaagagtgtgcagatatcaggctcagagccgtcctctggccatggcagagagtcaaaatttattacattaattgtatttagttttttttttttttttcttttttaacttgagatggagccttgctctgtcgcacaggctggagtacagtggcgcaatctcagttcactgcaacctccacctcccgggttcaagcgattctcttgactcagcctccctagtagctgggactataggtgcgcgcctccaggcctgggtaatttttgtatttttagtagagacggggtttcactatgttggtcaggctggtcttaaacacctgacctcaagtgatccacctgcctcagcctcccaaactggtgggattacaggcatgagccactgcgcccggcctatgtttagttttaaggctactgtttttatgtcatatgatgctagtttaccatttacaactgtgatggagctttccattttttaaattttaaaataatttttaaacaggtgtatgtaactgaacaaagtgagtcaaattcaagacaaataagtaaataatagtacatatccttacaccgaaaaaaagctgccaaggtgttggtggatgagtaatgtttcgagtagagacagtgctagcaggacagagcagaccattgctggatttgggagcctaaatggtgcaccgtattttgccaaaatacaaaatccaaggtggatgtgtgtgagcatgtttttgtatgtgtgtgtgggtatgtgtgtgagagatatatatatgtatacatgtatatatatatttttatatgtgtgtgtgtatatatgtgtgtgtgtgtgtgtgtgtatatatatatatgtatatttgatcttgtgagagacggacaccgtgagatgctgccatcttcacatggaacataaaacagtattgacattaggggaaatgcaggcgagacttgttttttccttcagatggagtcctgagaagcctccccaggaggaagtggtggcagccgctgggctctgaaatgcgcgcttctctttgttggtggtgttttctagctctgtttttctctaggaacaaagactcgttcttatggttcattgaaattattccatgttctttcagtcagactggcctgtgaagaagctttaagatatctttggaatattttgccctctagaaataatggcccaggagctttgtaggccctagaagttacctcaaagactagaaacgtgattgttccgccaaggcgtctttgtcccatacggaatcagaggacgtgatctggaagttttcccttcaaattatgaacaggaatgctaacgggggcagtggaatcagcatgggctttggagcttggcatttgaatcctgggtttgccagttctgggttgtgttgcgattttgggcaagtttctttcttgcacctcaatatcctcaactctgaaatgggtagtataatggtattcacttcagagggttgttatgagtcagttcatgtgcaacccttaaaacattgcctggcaggtagtaagtttccagtaattgttagctgttgtgattttcattataaggatatgtaaggtgttttgacacttggtagacatttaccacacactcacacactggatctctttgccatatgggtggcagtgagttggcttcaggtattcatctgcatttagaagttgttaattatggccaggtgcagtggcccgcacttgtaatctcaagccctttgagaggccaaggtgggaggatcacttgatcccaggagttcgagaccagcctggccaacatggcgaaaccccatgtctacaaaaaaaccaaaaattagctagccaggtgcggtggtgcaggcctgtggtctcagctactcaagaggctgaagcgggaggatcacttgagcctaggaggtcgaggctgcagtgagtcatcaacccgccattgcactctagcctgggcgatgtgagacctcgtctcaaaacaaacaaacaaacaaacaagaaattgctctttttaatgaactttcaggtgactgtcagaagaaatcataggagagcatttcttctcctttcaaagcatgcagaaaagaatgatttgttttggtgatttttttttttttaaccttttgaggaattagaatcagttttggacttttcaggaagctaaaaaccaaaaccagctgccctttgttgttcctgatgttattcttaatgcagttgaaaactgtcacgtgtatcccccagaggacttacgaaacggaatggctttttcaggcttttttttctcttttaaatatctctgaatgtttgtcatgtgatttttatgttccctgcatcacaagtttcttaccagcctctaactagtttgaggtgttgactggatgttacgattcttgtcatcctgaccaaaaatcctggggttcattaattggactctccccctcccttaccccaagtactttatttccactttgaggctctgtagtagacagtccatattgcatactcttttattttactgcttgattaaatgaattgcttggggtttttttttttttttttttgaaaaaagattatttctagcaatggggaacctccaggacgtttaacaaatctaagcccatttttatatctgatttttttttttttgagacaggatcgcactctgtcgcccaggctggagtgcagtggcgtgatcttggctcactgcaacctctgcctcccaggttctagcgattcttgtgcctcagcctccgagtagctgggattttaggggtgtgtcaccacacccagctaatttttgtgtttttagtagagacggggtttaaccatgttggccaggctgttctcaaactcctaacctcaggtgatccacccttcttggcctcccaaagtgctgggattataggcgtgagtcactatgcctggccctgaacctatttttatatctaaatttaaattaatatttgtcttacttatattgatagttgttgagaaatactgcctaggccataataaacattatgttagcaccgtcatcttcgtcatgaacctgacagtggagagaggtggtgagcatggggtgtgagctttggtgtcagatatacttaccttcatgcctccttcagccacaaatcaccagttaccagctgtgtaattttggactgacttagctcctttaaacctcgcatgcaccatctggaaaatcagataataataatgatactcacttgctagggttatagtcaggattagctgtaataatatttgcttggtacacccagttaaaacgtaataaactcaaaacttttttttgtatgactagacatacctgtgttttttgacaattactagtaactgaaggttggagggattgcctcattaattccttcattcaacaggtatttatttatagagtactatgttggcattggcgatgcaaattggatgagatggttgctgtcttcaagaaattcaaaactgaatctgggagttggacatgtaaattgtgggcaattatggtgacctgtaataaatattagttgtcatagggcgacagcagggttgttagcggtcaaataggtgggataggaattttaggcagagggaatagcagatgtgaaagtgcagggatgtggggcaaagtggtggggtgcatgaatgagtgttgtttggtttgggagatcagttggaaagtcagcaggttcttctctgctatcacagggaagtattggaatgccatcagttagggcagtatttcttttgtttattttttatttttgagacagagttttgcttttgttgtccaggctggagtacagtggtgcagtcttggctcactgcaacctccgcctcccacgttcaagtgattctcctgcctcagcctcccgagtagctgggactacaggcgcctgcccccatgcctggctaatgtttgtatttctcgtggagatgaggtttcaccatgttggccaggctggtcttaaactcctgacctcgtgatctgcccgcctcggcctcccaaagtgctgggattacaggcgtgagccaccgtgcctggcagggcattatttcttaaacttaggccattgtgtaccattttcaccatttttgccatttctatgttccatctgagccagaggttggcttgaggtggaattccaaggcactgtctactctggtctggtgctggttatattttttcctgacacacataaatgtttatctgggtttccctaaaatcgtgtcatgtactgtgtacctacagcgtagtatggtaccaattgggaaaaaagaaagaaaatgacaaagtcacatttgcatttcaggtagatagcttctgcccaggatgcatgggttggggtgggtggaggagtggaggtgggtggggtgagatggaatctgggagaaccggggttggagggcagagtgaagcagggactggggaagagacagaaggattgaggtttgggactgagccttgatgagattcagtgattacccagatgtggaggttgagaaataatgtcatggctctaccatggaagctttgcataaaacagcaaagccaaatagccagcaaacatatattaggaaaataaagacaccgaaattcactagtagtcaaggaaatgcaaattaaagcaacagtgagctgcctacttttcacccatcagactgacaaaacctcaaaacaacagtcaagattattgttagtggccaggcacggtggttcacgcctgtaatcccagcactttgggaggctgagtgggggacagattgcttgaggccaggagttcgagaccagcctggccaacatagtgaaaccctgtctctactgggggaaaaaaaaaaaaatatatatatatatatatatatatatatatatatatatatatcgagagaggagaaaagggtggtctcatgcactgctggccagaaagcaggaatgaaaagaaatatatattggtttttaaattatttatttttatttatttattatttatgtatttaattttgtgatggagtcccgctgtgttgcccagcctggagtgcagtggcataatcttggctcactgcaacctctgcctcccaggttcaagtgattctcctgtctcagcctcccgagtagctgggattacaggtacatgccgccatacccggctaattttttttgttttgtattttagtagagatgggtttcaccgtgttgcccaggctggtcttgaactcctgagctcaggcaatctacccgcttcggccccccaaagtgctaggattacaggcataagccaccgtgcctggcctttatttttatttattaagaaaatgtttttaaagacgggtcttgttatattgcccaggctggctttgaactcctggcctcaagtgatcctccctcctcaaactcccaaatagctgagactccaggtgcatgccactgtgcctggctgagtttttatttttttaaagcaagcttttggtttgaattttttgttctctcaggctgtggactttgaccagacttggagatcccattgactattggcttcatgtgatttctcgtgtctcatttattcacgcctgcatccaggggctcttgtttttctccattctctttttccgttttgatttactggctcctgcagcagattccttctcagtgccagcacctgttcctgattttgtcattcctcatccgccaagagtatccaggcagcatttgcatctagaccaagagttggagatctgtctataccagggaggacaattattgtttatattagtaacatttggaaattatcagagccgggcgcggtggctcatgcttgtaatccaagcactttggaaggccgaggagcacagatcacctgaggtcaggagttggagacccgcctgaccaacatagagaaaccctgtctctactaaaaatacaaaattagttgggcgtggtggtgcatgcctgtaatcctagcttctcaggaggctgaggcagaagaattgcttgaacctgggagccagaggttgtggtgagccgagatcatgccattgtactccagcctgggcaacaagaatgaagctccgtctcaaaaaaaaaaaaaaaaaagaaaagaaaaagaaaatcatcagaaattatgatttaccatttaaagataggttatttttccattttctggttcctctgtacaaagattaatttgattatttgtatgtacctttctgctattctcaaaccttcacacttatggtaccttgaaaactgctgccttgtgagttatcactgttgcaaagcatgaatttttttctttttactttttggtcaactattttttttgggggagagggggagggtcccgttttttctgtcctgtatgttttccttccctttgggttgcttatgttaatgaccaagaattatttgttctatatttttccatgcgtacacaattatttacagataaaatagccatgtatatatacacatatatgtagccttattgccattgttttacaaaaatagaatcatacataatgctgtgcatttttattttttatcttggtactcctgcactgaaacatttccaagttatagttctttttttttaattttttatattttttggagatggtgtctcactctgtcgccagattggagtgctgtagtgcgatctcagctcactgaaactctctggttcaagtgattctcctgcctcagcgtccggagtagctgggattacaggcacgcaccaccatgcctggctaatttttgtattttagtagagatgtagtttccctatgttggccaggatggtcttgatctcctgacctcgtgatctgcccgcctcagcctcccaaagtgctgggattataggcgtgagccaccgtgcctggtcttttttttttttttccgagacggagtcttgctctgtcgcccaggctggagtgcagtgatgcgatcttggctcagtgcaagctccgcctcccgggttcacaccattctcctgtctcagcctcctgagtagctgggactacacgcgcccgccaccgtgcccggctaactttttgtatttttagtagagatagggtttcaccgtgttagccaggatggtctcgatctcctgacctcgtgatctgcccaccttggcctcccaaagtgctaggattacaggcgcctgagccactgtgcccagcctccaagttatagttctaatgattctttttatttatttattttttttgggacagaatgtcgctctgtcacccaggctgaagtgcagtggtgcaatcttggctcactgcaacctccacttcccaggttcaagcaattctcctgtctcagcctcctgagtagctgggattacaggcgcccgccaccacgcccggctaatttttgtgtttttattagagacgggatttcaccatgttggccaggctggtctcaaattcctgacctcaagtgatctgcccaccttggcctcccaaagtgctgggattgcaggtgggagccactgcccccgcccggctaataattctttttaaaaggctacattgcattgcatgttgcagatgtacaaacagttgcctgtggaatactgactttgtttctgatttttactatgatggacaatgaagcaatagacattcttaagcatcattttttttttaatatactgaggattttatatttctggtataggtttccaggagttgggttgctgagtcagagagcagcctctggctttcgaaacatttctaccagtagttcataagtctacctttttctttcttgccaacaataatttcactggcacaagagtgtcattgctaggttgtatggtatttgcatagttagttttatctagagcggctgtaccattttgcgttcccaccagtagtgtggcagtgatccagtttctctgtgtccttgctagcatttgattttgtcatgactttgtattttagccattctgataggtgtgtagttgtgtcttattgtggtttgaatttgcatttccctaatgactaatgatgttggacatcttttcctgtgcttgttggccatctgcatatcccttttggtgagctgtctgttcatttcttgttcattttcttgctgttagggcttttatttttatagggtgatttcctagaagtgggattgctgggtcaaagggttatgcaccttaaaaaaaattatactggccgaacacagtggctcatacctataattctagcactttgggaggccagggcaggaggattgcttaagcccaggagttacagaccagcctgggcaacatagtgagacccctgtctttacaaaaaaaaaaattaaaaaaattaactgaccgtggtagcgcctgtggtctcagctacttgggaggctgaggtggaagatcactgggacccgggaggtcgagactgcggtgagccatgattttgccactgcactccagtgtgggtgacagaatgagaccctatctcaacaacagcaacaaaaattatactgcctgatgtctttgcagaaaggtatagcaattcatatttctattcctattggcaatacctatttccccatgctcttgctagcactatgattgcttttgaagtccttagtcctaacctgggcctcagtgttactatactttcttgggctattagtgagattgagtatcttttcttatatttattggccaactgtatttcacccttttgtggttgatttcttcaccttctgtgctttttattttttgagttgcttgtcttatccatttgtagaaacagagtttttgtgaatattaattttttcagctatatgttctgttaatattttctcatctgtcactttagttattgtttcactgtatttatggtatctttttgccatgtagacatttacaaattttatgtaattaattctgtgaaccttaaaatgttttggttttcgagtactgcatcttatcctcagattcttcagtatttttctcagttatttttactgtaaacgttttcattttttacacttaacatttttctttgatcttgacccatctggaatttcattctgtctgtggtttgcattaggaatttatccttatgagacaggaatttatccttatttttttttcagctgcatgatcctttgtgttaacgacattggttaagcagcccattctgcccatctgactgaagtgctaccattattatagataaaatgcttccatatgtattaggattttttttgggtgggggggctttcttttgttttgttcttttttttgagacgaagtctctctcgtcacccaggcaggagtgcaatggcgcgatcttggctcactgcaaccccagcatcccgggttcaagtgattctcctgcctcagcctcccaggtagctgggattacaggtacctgccaccacgcctggcctgtaccccagaacaaggggtgccaagtccttcctgcatttgttattggaattgtattaagtttgtacattaatttgggaaaaattgatgttttgagtttaataagtcttcccattcaggaaaatggtgtttctttttatctgtttgatctttatgccgtttaacaaaattttatgtttttcttcatatagggcttgcctatttatttttaaaaatgatttattttggctgggcgtggtggttcacacctgtagtcctagcactttgggaggccaaggcaggtggatcacgaggtcaggagtttgagaccaccctggccaagatggtaaaaccccatgtctactaaaaattaaaaaaaaaaaaatcagccgggcgtggtggtgggcacctgtaatcccagccactcgggaggctgaagcaggagaatcacttgaacctgggaggcgcaggttgcagtgagccgagatcgtgtcactgcacttcagcctgggtgacagagtgagactctgtctcaagaaaaaaaaaaaagaaagatatattttatttttgttactgttatgcatcaagttcctctcctctagttttgtctacctaaagtcaacttttaatgttatggtgtctttgtttttctttgtgcaaatttgtggggtatattatcttttacacttttttttgtcttttttttttttttcctttttgtggagaatgcggtctcgcgatattgcccatgcaggtctcgaactcctgggctcaagctgttctcctgccgatgcctccgtaagagctgggattacaggtgtgagccactgagcccggcctggggtatattatcttttattgcagtgtttttacatttgtgggttagaaagatttaaatctttttgtagatctgtttttttttatttaatattacaatctaaccttttaaaaaatgctatatccaagttttctataagcattttaaataattgcatgatttttcctcaccataacctttaaaccatatttcttcattccttatctgtagttcaaggcaataatatttctggttcttgaagcccgaatacttttttaaatgcttgttttagcaaatgagttaggttcagaaaagtatgaaagcaagaaaaccatgaccagtaatgctttttgtttttttgcgatggagtctcgctctgtcacccaggctggagtgcagtggcactatctcggctcacggcaagctccgcctcccaggttcacgccattctcctgcttcagcctcccgagtagctgggactacaggcccgccaccatgcccggctacttttttgtatttttagtggagacagggtttcactgtgttagccagaatggtcttgatctcttgacctcgtgatctgcccgcctcggcctcccaaagtgctgggattacaagagtgagccaccgcgcctggcaactatgaccagtaaatctttcaccaagtggctcttaatttttttacataattccctttggaattgttatatatgtaaatatatatatatagatagatagatagatagatagatagatagatatagatatataatttttttttttttttgagacggagttttgctcttgttgcccaagctggagtgcagtggcgtgatcttggctcactgcaaacctctgcctcccgggttcaagcgattctcttggctcagcctcccaagtagctgggattacaggcacgtaccaccacacccgacttttttttgtatttttagtagaaacgggatttcaccattttagccaggctggtctcaaactcctgacctcaggtgatctgcctgccttggcctcccaaagcactgggattacaggcatgagccactgcacctggcctgtattgtatttttcaagcataactgagaccatacttaacatacagttacctatcctgcttatttttcatcttatgttataaagatattgacttatcagtataagctcttggtaaatattttaaagacctaaatagctattgtttatctaaccagttccccaagtgttaaatatttaggcagtttctaaactttttttttttttaagacaaggtcttgttctgtcacccatgctaaagtgcagtggtgcgatcccggctcactgtagcctccgcttcctgggctcaagcaacccttctgtctcagcttcctgagtagctgggactacaggcatgcgcaaccacacccagggctaatttttttattttttgtagagatagggtttcaggccactgtgcctgtaatcttaacgctttaaaaaaattatttatttatttattttttagaatagagatgaggttttgctttgttgcccaggctggtttcaaactcctggcctcaagtgatctgcccacctcggcctcccaaattgctgggattgcaggtgtgagcaactgcgccccacctgttcttagatttttatctgatttgtagattatagtctaggattgatttctgctcctgaaattcatggattaagcatgtgaacctttttgaaaattaattaaacataaatatagctcatggctcatttttttttttttttgagatggagtctcgctctgtcccccaggctggagtgcagtggtgccatctcggctcactgcaacctccccctcctgggttcaagcgattctcctgtctcagccacctgagtagctgggattacaggcactcgccaccatgctcagctaatttttgtatttttagtagagatggggttttgccatgttggccaggctggtctggaactcctgacctcaggtgatcctcccatctcggcctcccaaagtgctgggattacaggcgtgagccactgagcccagcctcatggcccatttcaaatgattgtcatgtaatggccttgttcttactgtcttaaatctgagatatggctcatactgttgattgactgattttcactggtacagcagactccattccagctaacattggaattttacaaatgacgataatccagtccattttcatgattgtagttggttttctcaaaaaggctccagtaaagctgtaacatagtaaaagaattgccggttgtggtggttcatgcctggaatcccagcactttgggaggctgaggcaggcggatcacaattcaggagttcgagaccagcctggccaacacagtgaaaccccatctctacaaaaaatataaaaatattagctgggcatggtggtgcacacctgtaatcccagctccttgggaggctgaggcaggacaattgcttgaacccaggagacagaggttgcagtgagcggagatcgcgccactgcactccattttgggcaacagagcgagactctgactcaaaaaaaaaaaatcaagtaaataggtctttctgtcacaaggttaatttgatgcagtttataaaaatgcagcattcatggctgatcctgttgttttaatgattgccatgcaaaagtataggattcttaggaatcttttaatagattcgtgtgcagattaagcagtcttgaaatataggacaggctgggcttggtgtctcacttctgtaatcctagcactttggggggccaaggtaggcggatcacttgaggtcagcagtttgagatcagcctggccaacatggtgaaaccctggctctactaaaaatacacacaaaaaatggccggacgtggtggcccgtggctgtaatcccagctactccagaggcttgaggcaggataatctcgaacgtgggtggcagaggttacagtgagccgagatcacgtcactgcactccagcctggggaacagagcgaggctccatctcaaaaaaaaaaaaaagataggacaaagctcatgaaaacaaatgcttgctgaatcttcacagaaaactagttgagctggtgcagtgtccaggtctgctggtcttggtggacagtttcaaatgcagcaggaggaagttacttcattttccattcacaactcttttgctgctttatcagacttttactgagcacctggggggaagtttttttttttttttttttaaacagctttattgaggtctagtttatataccgttaaaattgtaagtatacaattcagtgatttttttttttcaattcagtgatttttgtgctttttttttttctttgaggcagagtttcgctcttgttgctcaggctggagtacagtggcacaatctcagctcactgcgacctccgcctcccgggttcaagcgattctccagcctcagcctctggagtagctgggattacaggagcctgccaccacacccagctaatttttgtatttttagtagaaatggagttttgccatgttggccaggttggtcttgaactcctgacctcaggtgatctgcccacctcagcctcccaaagtgttgggattacaggcatgagccacaacgcccagccaatttttgtgctttttaataaatttatagtgttgtgtaaccatcgatcacaattcagttttagagcatttccattatccccccaaattcccttgtgctagttaacacttaatccctaatttcaactccagccttagagaaccactgattaaatgactttctgtttctatatccaaatgttccttgacttatgatggggttatgtcctgataatcctattgtagagtcaaaaagtcataaattgaaccatggttatgttaaggactgtctgtatttacccttcttagccgtttcatggaatcatacagtgtgtggtgttttggatgtggcttccttcctctagcatagtattttcaatgttcttccatgttgtagcatggatcagtaccttattcctttttttttttttttttttgagaccaagtctctctctgttgcccaagctggagtgcagtgatgtgatctcagctcactgcaacctatgccccctgggtccaaggaattctcctgctccagccttcccagtagctggaattacaggtgcctgctgtaacgcccagtgaatttttctgtttttagtagagttgagatttcaccctgttggccaggctggtctcgaactcctgacctcaagtgatctacctgccttggcctcccaaagtgctggtattataggtgtgagctactgcaccccacctgactggtgctttttaaaaaattaaaatattcactgttgttaagtgacccacttatttaaaataatattcctagttcattaacttggaatggaagtttggtgtgataaaatggcaaggaggcagctgacctctccagtgaagccagagtgtctgcagtagagagtattctgggaaccccccagccctctcaacaaagtgagactctgtctcaaaaaaaaaaaaaaaaaaaaagtagctgcgcatggtagtgcatgcctgtagtctcagttacttggtaggctgaggtgggaggatcgtttgagcctgggagattgaggctgcagtgagctatgatcacaccaccgcactccagcctgggtaacagagcaagaccctgtctcaaaaaaaaaaaagaaaagaaaagaaaagaaaagaaagaactctactaaagctagtgctcctttcatttcgtgggaattatcatctactgcttcccatataagatggttcattaacttaattaacttcccatataagatgggaagcagtggaaagccttagtgtgacctcgtgtatgacatagtgcttccaagatgtgtccaccagaagctaaagagtagattcctgtgcttggacaggtgtgctctacttgattcactagttttaactcacctggattcaaatgaccgtttatacgaaatctcctgagatgcatctcccaccaaaatgtacatcaggttcatgatcttgagttccctgactggagagaccatgtcggtcacattctctgtagcaaccaggcatggtgctaagtgcacgggagctcacagttagcaagagcaggcagccctggaaatcagaccattaacagagagtggcgagcgctgcagtacaaagaagctcagaatgaggaaacattcaggaaggcttcctggaggagggaatacgtgagctaagtctttttttttttttttcttttgagactgagtttcgctcttgttgcccaggcaggaatataatggcacgatctcggctcacggcaacctccgcctcccggattcatgtgatgctcctgcctcagcctccagagtagctgggattataagcatgtgccgccacacccagctcattttatatatatatttttttagtagaaatggggtttcaccatgttggccaggctggtcttgaactcctgaccccaggtgatccacccgccttggcctgccaaagtgctgagattataagtgtgagccaccgcacccagtcgagatctgccttgaatgaccagtagatacgtgctcagatccaaactggaggtggaaagggcatatggggagggtgttaagtagaacggcctttggcgaggaaggcatcatagtgatctaattaaaagactagcatccacctgggtattcgtgcagtgttaggttagttgtgacctgtgtgcctctgtgacacagtactgatgatgtaacccaaaccttggggactggatttgtgcagttcgcctgcattccattcctcttagggccctggttttatctagagctggctgggcagttattgacttgtgcattggaaccaagcaaactaatagcaattgttgagttgattgctgtatttgcagaagattcttttaaagatagaggctttggttaattacagagaactctcaacataccccagagtttttttgtttttgtttttgtttttttctctctgagacagacccctgatctaggtcattgttgctatgtgccatggttttggtttctgtggtatttagagagttttggtggacgtcccagctttcaggaagccttaaaatatgtgcttatgaggctgggtgcaatggttcattcctgtaatcccagcactttgggaggccaaggcgggcagatcacctgagttcaggagttggagaccagcctggccgacatggtgaaaccccatctctactaaaaatacaaacattagccaggcatggtggcaggcgcctgtattcccagctacatgggaggctgaggcaggagaatcgcttggacctgggaggtggacgttgcagtgagccgagattgtgccattgcactccagcctgggcaacaagagcaaaactccatctcaaaaaaaaaaaaaaaaaaaaaagtgcctgtgtgtacagagactaacgtatgcacatctataataattaagagtgatatctgcccagcaaagaggtttgtttcaatgtgggggagtattctgggatctctggttcaaggttaatcattgatttacctacccactggaaaaagatttgtggaacacacattatataccaggtgctgagctaggtgccaggaatccagcaaagataagatagaaggtgaaaaccaagcagtatggttgaggggaagtattagatttgtgatgcctaataggctcccttctgtgcagggccagctttggtcatttgccagtggtggcctacaatgctgggatcgattagtgatgtctgtcatgggcaccgaatacagtggaaaggcatgaatgctgtggatttgctgatgctgtgttaggggtgtgtagtgtagacagaatgacgagtaaagattgagtaaggtagccagaggacttttatcttagaataaaggatgtttttcgtgatgatatgggggatggaggaaactacattggatcagcttgcgaggatggagttcaggtacagatgtcactgctttttatgcagttttcaggaggtcacgtaaatgtcagcctcagcttcttcaagtgtaaaatggagataatagtacgtgcctcatctatattaaagtgttgatgagaagagtaaaataatgggtatgaaaatattttactacccacagagtgataaacacctggagtattgttaccatgggtgtcgggatgggtggagcagcaaatgcccgaggccaggcaaggctgagccggatggtggtggcctcaaggcctttgcactgggcctgtctttccagcctgctgcccttgtcatatccagctcgtaattccaaggccaccttcattcagcccacagaatctaagcctgtccttgccccatcgccacctgccatctcatcctgtcttattttcttctaagttctgattaactgaaatggtctggttaacttatttgtgtacctccctttgctagaaacatgcacatgagtgaggcagaaaccgtgcctgtctcactctcactgtcatctcctcagagcctagaacagtgcctggcatgtgggagacattcagaatttcttaacttttgttgtatgaatgaatggaaagggctcagaagtccacagacccagttgggcagaggctcaggagccctgagaagattgctaagatcaagtgcagttgctgtgacctcatctctttgttcctgaatctcctatttctttggttattgagaaacaaattcaattaaatgcacagtaattgtaacttaattgaaaattccatcaactcacaatctgagttcacaatgtattctcttacaacagaataaagaacaagaatcagaattcatattattattatttttagagcatgtaatctcatataatctctttagagcatgtaatctcttatataaagaatgagaatcagaattcatatattctttttagagcatgtaacaggccatgaaattacacaatgtttccaatttggcagcctggtgaattcagtctccaaaaacataatcttgttccttaaactacatgtaatatgaattagagttaaaacttgtgaattggatgcaattaacatccaaccgctccccacactgaactgattggtttttaacttttcccccctctgcacccccgccagctggcacccgtccctgttcccatgttccttgtgaattgttactgtgccagtctgatgcatatgggtagactgtgctgggcatcctgagctctgtgaaatgaacatcaacacgggaggtgtgtggagtggcgcaggtcagttaccaagcctgcacatccaggtgtctcctgtctgccttcacgctgaggtttacacctggcggcttactcacttcctggagatgctggggccgccctagttgctactcccttttctggggggactgatgagtcattggttttctcacagggtcacctgtctgtgtgcccagtttgaagccgtcctgcagcatggcttgaagaggagtcgaggattggcactcacagcggcagcgatcaagcaggcagcgggctttgccagcaaaaccgaaacaggtactgctctgcctggctgtagcttggaggagcttgtcttccttctgctctttttctttttatttattttttaatagtgggcagggcagtgatcgcgtgggacttggtggggtggtgtatgggcacagaaatccatgtcttaatagtagtcaaaacgtaatggtgttgtctggcatcttaatttaaatgaagtcatcttttgtgcagaattctcagagccacatggtacagtctcctctgggttcggggacctgtagcacactggtttatttcaccactgtggcgtgccagttgctgggaaattaataatctgttttaatttgatgcctgaggatagcatggcatttcataattaatgtcttccataccagcaacagaaaccccagaggttctgttatcatccaatttaatgttggaaaaacatttccatgtgagtgacaagcataatgctaaataataactattaatgcttagtacttagtgcaagacttgcactttgatgtaaattaactcattcagttcgatagccctgtgagtagtagggactgttattactgccactgtacagatgaggaaactgttcatagtgatctgctttggagctgaaccttgaagtggatcatgtcatgtaacaaatgtcctgtggtctcctcctcccctgagctttcagttccagccctgaccacggctgctgctgggaatcccggaatctttcttatcactatgtcagtgtcgttgctgagtaaaatgtgctgtctttggctggttcccctttcacagccaaaagttggaccttgttgcatttggtggcggtgtgtggaaattctctgctaacataatccttagtctttccctctccttcatgttgctgtatcatcctttcttttttctcaacccttcaatagatctttttatttatttacttatttattttttagagttggggtcttgctctgttgcccaggctgaagtgcagtggtgtgatcatggctcaccaaagcctggaactactaggctcaagtgatccccttgcctgagcctctgaaatagctaggattgcaggcttgcaccaccatgcccggctggtttttaaacttttatagagacagagatcttgttctgttggccaggctggtctcaaactcctaggctcaagtgatcttcccacctcagcctgccaactagctgggattacaaatgtgagacactgtgcctggctccaacagttcttttttttaaaaaaattattattaaaattattttattggtacataatatttgtacatatgtatggggtacctgtgattttttattttttattgagatggagtcttgctcttgtcgcccaggctggagtgcaatggcaccgtcttggctcaatgcaacctccgcttcctgggttcaggcgattctcctgcctgagcctcccgagtagctgggattacaggtgcccaccaccatgcctggctagtttttgtatttttagtagagacaggtttcaccatgttggccaggctggtctcgaactcctgaccttgtgatctgctcacttcggccttccagagtgctgggattatacgtgtaagccactgcgcctggccttggtacttgtgatattttgatacatgcctagaatgtgtaatcactttcaacagatgtttgctttttttttttttctttctttgggcagtctcccggggctagggtaagttcagagaggctcctagatctttgtttcttgtttatttcaccagttactcatttgtagaaatgagttgttcaataaacacacagttgttcaataaaattatgttcactaaacaaatacatcttggttggaaggaagggcattattcattgcgtgcagtactgtatttcatggttcctgaggtaccatataccaggatcactccagcttgctacagggaaagtgattaatttttgaggaacaaagcaaaaattaatgaaaagtgacccagagctctacacagacttggcttgctgtctttgtagccactggaaacccaagtagccagtacagaatacagtatggagaaatgaattattttccattccacttgggaaaggagaaagaaccactgccgttattggcgtttgatgcatttgatggcatgaccttggaatttgatttttttttttttttttagatggagcctcactctgttgcccagtctggagtgcagtggcatgatctcagctcactgcaacctctgcctcccaggtgcaagtgattctccagcctcagccacctgagtagctgggactataggtgtgtgccaccatgtctggctaatttttgtatttttagtagagatggagtttcaccatgttggccaggctggtctcgaactcctgacttcaggtaatctgcccgcctcgacctcccaaagtgctgggattacaggcatgagccaccacgcctggctggaatttgatgttcttttaatcactgatatatcatcgtcaggttataggttggcagtcaattacaaggtgatcggggccattcagaatataccagagacacagttactgttgctgagctgcctgtaaaattgaagtctaatcttccctgtctgttcggcagccttgggcaatgaggatctgactttgaaacactgccttcccttgctttctgcgatgccatagcctcttggcacactttcttcttcttttctgatccttgttggcatatcacttccataccctcaaatattattcatccttggattcattgttggctcttgtttctatgcatactgtttggattccttggtgaagttgctctgtatgtgcctgttattcttagtcatacccgcagcccagagcacttccttgaactctgtctcatgaatgtctctatttggcgtacagcacgggcttgtcagtctccaaaactgaattctgatcttcatccatatgtgttcctgtgtttcttgcttagtaaatggctctgccttttacccaggtcccctggacagctcttgggcttcctcccagccttctccttctccctcttctctgccccaaaaccagtcccacaaagagcattgttttctgtctctcacatgggtccctgagccactcgcggttcctccatcctcagtgaattctcttctttctccccgacttgtgttttcctgccttcagtcttgatcagctctgacccactttgcacatcatggagtggtcttctttaatgaccatcccactcccccacttattccccgtaaccccactaacttaaagctcttctgtgggtctcttgtagaatcgggacaaagtatccagtgcgtgatctggcttcttgggctctcttccctactggctgtatctgtctctgttctacctcttatgccgtgctgtatgccagggctgacaggcagcggcaggtctgacatcacaactctttcatccagtttgcaaataaatgatggcctgagtcccacaagctcccctcctgccacgcccctgccttgggactcttgagacctctccataattcagcagctgaagcactaatgccagatcctgtgtggggcagggccttcagtgccgctgcctgtgctttgcttggtgcctctcagtaatttagatgattcagttctgtattttttttttttctgagacaatgtcttgctctgtcgcccaggctagagtgcagtggtgcgatctcggctcactgcagcctctgccttctgggttcaggtgattctcgtgtcttggcctcctgagtagctggcactacaggtgtgtaccaccacgctgcctaatttttgtatttttggtagagatggggtttcctcatgttggctaggctggtctcgaactcctggcctcatgtgatccacctgcctcagcctcccaaagtgctgggattacaggcgttagccactgttcctggcccaatcctgtattttgaacagctctcctagtttctgttgtcttgaaactcttcaagtctggcagttctttcccttctgctaccttccttccttccccagctctcacccaagctcctactggcgaaacttctattctctcttaaaaaaaaaatatggccgggcgtggtggctcatgcctgtaatcccagcactttgggaggctgaggcgggcggatcatgaggtcaggaaatcgagaccatcctagctaacacggtgaaacccatttctactaaaaatacaaaaaattagccaggcgtggtggcaggtgcctatagtcccagctacttgggaggctgaggcaggagaatggtgtgaacccgggaggcggagcttgcagtgagccgagatcgcgccactgcactccagcctgggcaacagagtgagactccatctcaaaacaaaacaaagcaaaacgaacaaaaaaaaaattggtaaaatatacataatgaaatttaccatttcagccatttgaagtgtacaattcagtgtaagtgtacttaatgtacattcacatgtcatacagtaatcattaccaccattcatctcagaacctttccatttttacaaaccaaaactgtgtacttgttaaacactaacactcactccctccacacccctgtccctggcagccagcattctactttctgcctcagtgcattctactactttaggttccttgtaccaatggaatcatgcaatatttgttcttttttgtctggctttatttagcataacatcttcaaggatcgtccgtgttgtagtatgtgtcagaatttccttcttcttcttcttctttttttttttttttttgatggagccttgctctgttgcccagtttgctggagtacagtaagtagcgctatctcagctcaccacaacctccgcctcctgggttcaagcgattctcctgcctcagcctcccaagtagctgagattataggcacatgccaccatgcccggctaatttttgtatttttagtagatacgtggtttcactatgttggccaggctggtctcgaacccctgaccttgtgatccacccacctcggcctcccaaagtgctgtgattacaggcatgagcaaccgcgcctggcccagaattttcttctttttaaaggctgaacaatatttttgagggtatgtagagcccatattttgtttattcccatgacagttgggtgtcttccacttatgggctattgtgaatggtactgctgtgaatatgaagatacaaatacttgttttttccacttttagttcttttggggcatacacccagaaggacaatgttggatcatatgataattctatgtttaattattttttagaaaccatcagagggttttccatagaggctataccctgttgcattcccactagcaatgcacacgagatccattttctccaccatccttccacatccttgccaactccatagccttgccagtgttgggtttttatttattttgtgagatagaatctcactttgtcacccaggctggagtgtgatcttggctcactgtagcctccaccccccaggttcaagtgattctcctgcctcagtttcccaagtagctgggattacaggcgtgcgccaccatgcctggctaatttttgtatttttagtagaggcagggtttcaccacgttggccaggctggtctcgagctcctggcctcaagtgatctgcccgccttggcctcccaaagtgctggaagtacaggtgcgagccactgtgcccggccaatgctggctttttaaattagagaaaaggtatatagctttaattgtatacatggggagaaccagagagtgattaccacccccttttttcatatatatatatgtatgtatagtaattttattatttttttgtagggacagtatcttactatcttgcccaggctggtctcaaattccttgccctaagtgatcctcccaccttggcctcccaaagtgctgggattacaggcctgagccaccgtgcctggcctccttttttctgttttcataattgccatcctaatgggtggaaatggtgtctcatgtggttttgttctcttctcttctgaagtttcagaattgttttcaaaaagccattcatgagctccctacatggttcacctggactgtgcccctcctatagtcctgagttcttcttccatcaaacctatgtatggaactacccgttttcttttttctttttttttttttttgagatggagtctgatctgttgcccatgctggagtgcagtggtgcaatcttggcccactgcagcctatgcctcctgggttcaagtgtttctcctgcttcagcctcctgagtagctgcgattacaggtgcacatcaccatgcctggttaagttttatatttttagtagagacggggtttcatcatattgggcaggctggtctcgaactactgacttcaggtgatccgcctgccttggcctcccaaagtgttaggattacaggctcatccttgtagctctagtgtcttgcaagatacctggccacctacacagtagatgccaccaaaggactgcattcaaaataaccacttgaagaccctgacttcagaacatgctgctcattttcccaggaagccaaacccctactctcagtggtctgtacgcatcttcagtcagtgggaagcggtggtaatatacccataactgtaaaatgagagagaccgacttccttgatcttcagtggggatttttgaaaatggttgattgcactcaaagcagaatttgtattttgcttcattgggtcaccttgggcaacaatttcatttctgtagaaaattaattttggaggaagctgcatgtgccaggggagccctgggtccatccttttgatggtgaggggaagtccagttcctcactcgcccatccctgctttcggttccctgttggtgattttcttttgtattcatgcacgtgccaatcagctgcttttggtaagggaagccttggaaggatgtctgctaaaggtgcagagaaaatgcagagctccattcaaggtgaaaaaagtggttgacaactggcagaaagaagctggctttagggaggaagtcagaagccagggtgctgtacccgttgggctgtgtgttatcctgggtcactggatcatgggcatgtccacagggtccctcaggggtgggttcttgacacccagggtggcatggacttgggccagtggctatttactaaggggtatgaatgtgtctcagcatgttaagatctagtggagctggactgatacctattggccgaatgtgacctctgcctgtttcaaaggtgtttaatcctgatgtctcataaattaagactcaggcttgtaatcccagcactttgggaggccgaggtgggtggatcacttgaggtctggagttcgagaccagcctggccaacatggtgaaaccctgtctccattaaaaatacaaaaattagctgggcatggtggtaggcacctgtaattccagctacttgggaggctgaggcaggagaattccttgaatccaggaggcggaggattcagtgagccgagaccgtgccctggcactccagcctgggcgacagagcaagactccacctcaaaaaaaaaaaggtaaaaaagactcagtttggcctctgagttgtcagtttttagatcacagttatccagcctgagttccgtgggtcctttgctttgctcctttcagaatgtaaatgactcttcagctcatgatggcgtatgcccctaaaaggaagtgagatacaagctttagaagtccgtcttagaaatttcccttttttttttttttttttttaaataagagacagggtcttgctctgttgccaggctagagtgcagtggtgcaatcatggctctctgcagccttgaacttcctggctcaagcgatcctcctacttcggcctctcaagtagctgggactgcacatgcacgccaccatgcctggttaatttatttcctactctttaataaaggaggtggtatgctgtaaactcttgtaggatgtgggtgtattatgctgagccctggttctggaaggcactcttgcggctagatggaagttggtagagtgacagagctcagccccttgttggcactctgctctgccaatccatttgtgccttgtggtcaggctggttcagtttgggatgtgacagatttgggagcacttgtattcactgagttctcaggctggcacatgagtgaacttggtttacctttgttcctggcatggctgataccatgtgtggctgattctgttagagtgtgccctcacattcatccctctgtcttctttggctttgatagaacccagattttgcttgaggctgtggtatgtagtcctttatctcggtgagggattaagccagttttgagttttgttctttgctttctctgctcccttgtgattttctgggattacttgttctttcctggtaaaaggggtgataaagctggcttcatcccgttccctttcttcctgctcaattgtaaatgagatgtccagagttaggacagtcctctgggacagcgagttcaaaaggttggagattttggcctgacatagcctttgtatctatcactggcctatttccagactagcccagctccgtggggttggattttctttgtgtgtgggtttttttctttttgttttgtttttagagacagggccttgctctgttaactaggctggagtgcagtggtgcaatcatagctcactacagcctcaaactcctggggtccagccatcttcctgcttccgcctcccaagtagctgggacgacaggtgtgtgccgccacactcggctccttgtagttgggttttctgtttcctttttttagagatgggttcttactatgttgcccaggctggtcttgggttttctgtgtttttctttctttcttttttttttttttttttgagacagagtcttgctctgttgcccaggctggagtgcagtggcaccatctcggctcactgccagctccgcctcccggattcacgccattcttctgcctctgcctcccaagtagctgggactacaggtgcccgccaccacgcccagctaattttttgtatttttagtagagatggggtttcaccgtgttagccaggatggtctcgatctcctgacctcgtgatccacctgcctcggcctcccaaagtgctgggattacaggcgtgagccaccgcgcccagcgggttttctgtttttgtttttgttgttgttgttgttgagcaatgctttgtttgttttggggcagtgttgtcacattgatgagacacccctcaccccgcatggctgtggagcacaggtgttgctcagcacctggtgtgttcttggtcttctatagatgattgtcagatgactgaagaacatgccctgtctcactgcgttatttcctgtggttgcaaatgatagaaaattctttagattgatttaagaaaaaaaagatgaaggacatttatttattgactcaagtaattaagaaatcatcttggagttgagctggattaagggggtctgccttctcccaaatctgtctccatctgtcgtccctcaccaccgcttctctgtggttgggtgtctttccgggtggggtctcgctacattatggggtggaaaatggccccaagtagctccaggtttccaggatgatgagagatcctacttctagaacggggtcggcacactccctccttacgggtcatattatagggtttgtgagccatgcgatctctatcgcagtgactcagctctgccactggagcagaaactcagccacagaccatatgggagcaaatgggtgtggctgcgttccaggaacaccatgcttataaaaacagtttggaggccaaatttgactcccaggccattgtttgctgacctcagctcctggaggagacaaggcctcttttctggtggctctggtagaacttgtgcgaagagaccctgtggtccagggctgagactggggtgaggttagtgagacactcactttggccacaaaattgaaggcggtaccaaaaaacttatcaatcaagataaatactatttttatgtaatattaaaaaaaacgaaagttgcatatgccatggttccggccagttaattgcctgccctgggttagctgtccacccctgcagtagggggaggttaggatagtgctgaaggatcccagtggaatgtgtttcccgtaggaaagcggggtgctcttactagaagaaagggaaagggaccaggctcagtggtttacgcctgtaatcccagtgctttgggaggccgatgctggatgatcatttgattctaggagttcaagaccagcttgagtaacatagtaagaccctcgtctctacagaaaaaaaaaaaaaattagccgtgtatggtggtgtacacctgtagtcccagctactcatgagcctgagatgggaagatcgcttgagcccaggagttcaagactgcagtaaactatgattgtgccactgtgctctagcctgggcgacagagtgagaccttgtccccaccccgcccctcaaaaacaaaacaaaacaaaacaaaacaaaaaaaaccccaaacaaggaaaaggaatgctgtttggtgcacgtgtagtagtgatattaatagctggttttcattgagcaccaattatatgccaggtatgttaataactatggctaacatttattcactgcatttattggatacactttacatgtattcctatttctcatttttccctcatagcaatccatacacgtaggtactgttctccccactgtacagatgaagaaagtagaggacaaaataagtttcccaaggtcacacagtgcctgaactagaatttgggacaaggtttttgtcttccttgtggtccccaagtcttgggcatcggtgatagttaaggcttgatagaaactttcccaaaagcctggtgctgttagtgtcctctgttaacaggtgccccggggcagctcttctcaacaccccttcctggcacttgttcttgttggcattcggctttcaggtgtttggagaaccagaagcccttgcccgctttttgacttaaccccatgtttcaaagcagatcagtgtatatccctaaattaaattacggacaccgcaggcgctaattggcaggtgagctgcgctttaaatagaccacattaattctggcagtggaagcggaaccctgctgggataattcttatcatcatcagcatcaccctgactagctttaaaaggattctgtagcagtaagcaatttgcagaattgaaaggtgaaaacacactttaaagcgttcatgtagattcaaggtcggagggaggtgactgcatttttcaagacaggctgcaggtgagagtcacttgactggaaatgtgatggacgtaccgacaatggtctggggtatttcgaaatacgttgttggccagctggcccagggtgttgttgtcgccagattccccgtcctggtttcttgagtgaggcggagaatggaaggaaggctgttttgtacagttgtgtggagtagactgatcggatgagcttgggaagtggattactttgacatttagggattgagacacaagatagtctcgagggacctgccctcttgctggtttttgttattcctgggaagtttattctaaatgatcccagtgattggcttgatccacaaatacttatgcacactcatacagatgtatacatttagatgctgctaacacaaaaaggaacccacgcgaatgccctctgctatgaagggaattaattattaagcaaatgctgattggtcatcatggactgggcactgtgctcggtgctttccttccctttctagttaccccagtaaccctgggcgattctgcacttttgtgttgattttatgggagaggattttcaggcttagcatggttgagtgacttgctcaaggtcatttggttgaatggactttttctctgttgtcctgcctgctagactggaagccccttagggacgagttcttgttgtctctagctggtgacacatagcctagttcggttcacagctcccaggaagaatgcagtggatcctagtgaagttgaattgaaacattagagtgaatttaactagcctgccatgcagtttctggagatgggtgtacttgcctccttctggaaggcaggttcaaagcctttgtcacatttcagaggggactgtgagcctgtttaggtcctagattggaagccaggtctgactgtaaagactcagcttcccctacttggaatattaaacagttgtgaacgtgatcattttgaagaaggccaagtcccctcattttgcagggcagtgtgatttagtggtttgcagtgagctctggggtccctttctgccatactgtttactaactgtgttgctgggcgagtcgcttcacttgtcctggcttcagaccttgtctttcacatggcgatggccttggttgtgatgatgtcagatgtaaagtgtttactgcaatagctggtgcatagttaatgctcagtaaatagtagttgctgttgctgctgttattattactgccagcatgaaaaaatgttaaagaggcaatgttaagtgaagaaaattgatcacaaaattatgtatacactagcattacaactatgaaaatatctggggttgggcatggtggctcccgactgtaatcctagcattttgggaatctcaggcaagaggatcgcttgaagccaggagtttggtaccagcctgccagcctgcacaacatagcagaacctcatctctacaaataaataaaaattaaaaagttagctgggcatgggggtgcgtgcctgtgtctcagctactcgggaggctgagacaggaggatcacttgagcccaggacgttgaggctgcagtgagctgtccagcctgggtgacagagggagaggccctgtctcaaaaataaataaataataattaatttaaaatgtatataacaaattttaaaaatctgtgtacatgtggataaaaagtagtgggatgtgaggagatacaagtagttgtaggaatgactgtcttatggataaaaacaaactttcttaggtttcccataacgccttaaatctgttcctatcctcagactgagtaattcgacatgtggaaatctttcgtaaggaactaggaatgaggacaattatttatgtataggggtgttctttactgtacagagggaaagttggccatgtgccatgcccttagtagtagggaaatagttatgttttactggaaagccatcaaaaatcatctttgaaagacttttaattgtaataggaaaatgttcatgctctagacaagaaaataaatgaatcaggatacaaaattacacatataaatatgtatgcatatacactcatacaatatgatgtggttttatttatttattttttgagacagagtggagtgttgtggcgtgatctcggctctctgcaacctccgtctcctgggttcaagcgattctcctgcctcagcctcccaagtagctgggactacaggcgtgcgccaccacacccagcttttttgtatttttagtagagacagggtttcaccattttggccaggatggtcatctcttgacctcgtgatctgcctgccttggcctcccaaagtgcttggattacaggggtgagctaccgcgccatcctgttttttttgttttgttttttttgagatagagttttgctctgtcgcccaggctggagtacagtggtgcgatcttggctcattgcaccttctgcctaccgggttcaaatgattctcctgcctcagcctcccgtgtagctgggattacaggtgcctgccaccatgcctggctcattattgtatttttagtagagatggggtttcagcatgttggccaggctgatctcgaacccctgacctcagatgatccgctcgcatcggcctcccggagtgctgagattacagatatgggccaccgtgcctggcctgatgtgttcttttcttctggctgctgtaacaaattaatacacagttgttggcttttaaacactataatttattctcccacagttctggaggtcagaagtccccaatcagtttcactgggctaaagtcaaggtgacagcagggctgcttccttccagaggcttcagggctgaatccgtttctggcccttccagagtctgctcgctgcccaccttccttggctatggctgccccattctagtctttgcttctctggccacatcatgtcctcctcttctgtgtcaagtttctctctgcctgcctcttatgaagatcttgtgattacgtcagcctcgcagggattatgcaagataacctcccaatttccagatcctaacacagttgcatagactcttttactatataaggtaatattcagagaattctggagcttaggacgtcgatatgtttgaggattataattcagcctacagcaaatgttgatttttttataaaaaagaaaagtgcagtaaaaaagactgaaaactcttgaaaatgtcaatattggtcttttctggatgagaggttttagagtcatttttatttttgatatactcttctgtatctcccacctttttttcttatttcattattgtttttgaggctgagtcttgttctgccaccaggccggagtgcagtggtgcaatctcagctcactgcaacctccgcctcctgggtttaagtgattctcctgcctcagcctgcccggtaggtgggattacaggtgtgcgccaccatacccagctaatttttgcatttttagtagagatggggttttactgtgttggccaggctggtcttgaactcctagcctcaagtgatccaccacatcagcctcccaagtgctgggattacaggcatgagccaccgttcccagcttcaatttttattttagattcagcgggtacatgtgcaggtttgttacctgggtacattgcgtgatgccgaggtttagggcacgattgaacccatctcccaggcagtgaacatagtacctggtaggtagtttttccgtctgtgctctcctccctctctactctctctagcagcccccagtgtctgttgtttgccatctttatgtctgtgtgtacccagggttgagcttccatttataagtgagactatccaatatttcgttttctatttctgtgtaattcgcttaggataatggcctccagtcatccatgttgctgcataggacacaattttgttctttttcatggctgcatagtattccattgtgtaaatgtaccacattttgtttatccagtccactattgatgggtatctgggttgattccatgtctttggtgttatctcctaccttttccatgctaaggggatactctgttacaatctccaacttcgcctagaggctttgtgtgttcctctcccagtgctgagtgccccaggccgagtgccaggcgcctgtgccctctctccgtagagcccgtgttctggtactacgtgaaggaggtcctcaacaagcacgagctgcagcgcttctactccctgcgccacatcgcctcagacgtgggccggggtcgcgcctggctgcgctgtgccctcaacgaacactccctggagcgctacctgcacatgctcctggccgaccgctgcaggctgaggtacgtggccgggatgcgaactgggatgggatggagcaagaggtgaagatcttggagtctggaatcagaccacctggattttcatcctagttccccgatctgggggaagtgggcctccctctgacagctccggagtgttctgctgagctgtggagaaacttgggggagaatcattgagagactgcctgtaaagggctcggcatggcacttgcatacagccagcttggatgtggagagagctgttgtcttaggacatagcttcctcttcactttctggattttttttttttttttaaagacagggtcttgctttgttgcccaagttggagtgcagtggcatgaacatgggtctttgcagcctggacctccctggctcaagcaatcctcccaccttagcctcctgagcagctaggaccctaagcgtacgccaccatgcctggctaatttaaaaaatttttttgtagcgatggggtctcagtgtgttgcccaggctggtctcgaactcctaggttcaagtaatcttcccacctcagcctcccaaagtgctgggattacaggtatgagctaccatgccaggtgcagaattttaatttgggattcttgaattcattcaatcccaaactgaaaaaaacatggaaattttacattggggaaggaagtcattttttttgttgttgtttgtttgtttgtttttgagacggagcctcactcttttgcccaggctggagtgcactgatgctatctgggctcactgcaacctccgtctcctagttcgagcgattctcctgcctcagcctcctgagtagctgggattacaggcctgtgccaccatactcagctaattttttgtatttttagtgggtacggggtttaatcatgttggccaggctggtcttgaactccagacctcaggtgatctgcccgcctaggcctcccaaagtcctggggttacaggcgtgagccactgtggctggccatggccattagttttgctctgagaatggtggactagacatgttgttttgtgtccttgagtgatacggagcgacactgacgaatcctgttctggttccttaagtaacttccccatcagcaacgcccagatcgtcaacagtgaaatttcactgaattccgtaagtgggcagtttgtgagtagtgtggcatgttcccttgattttatgtcttgccctgtgttccctagttcaggtctcctcttctgctttatctactgctgtggtcacctctctactggtaatgtctcagatcttctgggattgtgcactggggctcttaaaaatactcttaaagttctctgttgcctgtggctccttgttcaattgtatggcaagactctatgggtccaaaatgggagtgcttgggaaccaggaggactgacactgatgacacctgtgtactgctcacggtcagagttcggaggctgagaatgtctggatctctagggcattaaccagctttagttaaggaaaacacactcctgtttctttctttccttttttttgagaagaagtctcgcttttttgcctaggctggagtgtagtggcgcgaccttggctcactgtaacctctgcctcccggcttcaagcgattctcctgcctcagcctcccgagtagctgggtctgccagcgcctgccaccatgcctggttaattttttgtatttttagtagagacggggcttcactgtgttagccagggtggtcttcttgatctcctgacctcgtgatcctcccgcctcggcctcccgacgtgctgggattacaggcgtgagttactgtgtctggcctactcctttttttcgaagtgaatttctgtgaagctccttccagcatattatttacgggtagttcagagttacatactcagtctcaaagttgaagtgaccaacaagaagaaatgagtccagcaggtaagaatcacagttgaccttacctggatcaccagccacttccccagctggatgttgggaaaacacattcatttagatgcacgaaaacaggctcagatttttaaaggattatgattttaggaatcaggtgcagtcagaatgtcagcttgagcatgtggtttgtacgtctactaacattttctggggaagtatattggaaatgcgcctcttctttctttctgttagttgtattcagtcacttcagtggctaatttttccagtctctcactcaactacaggtcatgtatccctgactttgctttagcgaaattgactttttccttgattaatttagaattcaatgacctggcggggaagttatggcattggggatttttggttgccattacttaacaggaagacagagagagcttgcaagttggactcgggagacctgcttttaagccctggctggaccatttattggccagatgaccttggacaggccctgtaggcttccttgacacccctaccccaactgccatctatatttgtggggcatttttagcctcctagccttttccaaggataatgtgggctttcaggtctgtaacctaggcaggcattatattattattattattattattattattattattattttgaggtggagtcttgctctttcgcccaagctggagtacagtggcgcgatctctgctcaccaagcctccaggttcaagcgattctcctgcctcagcctcccgagtagctgggattacaagcgcctgccaccatgcctggctaattttttatatttttagtagagatggggtttcactgtgttggccaggctggtcttgaactcctgacctcaagtgatcctcccccctggcctcctaaagtgctgggattacaggtgtgagccaccgtgcctggccaaggcaggcattatattaaatgccctggttgatgaagccgtagaggctctgtaatttctgtctgaaatggtctcttcttgtattaggcaaatcaggcgagccctgttggcaggcttggatttcctgtctgtctcttggggacgttgcttgagtggaagtcacccacctgacagctcccttctactttgctgctttataaatacattgacatatcatgtctattttagtactctaaagctgagggtcggcagggggaccagtgaggaagttgtaggatgtaagtgttcagtcttctgtttgtaaccagaagctgtaaaccagcagagacctcagacaaatcatatccctcttggggtgaccaggtgcagatcttccagggagccgtctaatggaatttcctggttaatggacacagagaaccactgctaagaacgatttccttttctctttcaatctgcagcactttttatgaagactggtcttttgtgatggatgaagaaaggtccagtatgcttcctaccatggcagcaggtaagcctggcccagaccagggtgcagggccttgtgacacttggcagaggggctgccttggggcagttccacagcgccatggagtgttgtgattcttctgtccctcaacaactcaatgagtcacttgctgctgtccttcttttactaggactgaatgttggttttttaatttgtattcctttaaagagagagcctcactctgttgcccaggctggagtgcagtgatgcaacctcggctcactgcaacctccgcctcctgggttcaagtcattttcctgtctcaaccttccgagaagctgggattacgggcgcctgccaccatgaccagctaatttttgtattttaatagagatagagtttcactatgttggtcaggccggtctcgaaatcctgggctcaagtgatccacccgccttggcctcccaaagcattgggattgcaggtgtgagccaccgtgcccgaccacagtgttgggtccatttatctagaatgggagaccctggcagagaaagtgaagatttgaaggtttttagttgggctttggagatgtaatatacattgcggggaattggaggtgggagacctacctttgaatcctggctttaccccttgctacctggtgacctgggcagatgccgtaagctttgctgccttttctttcctctctgtgaggtgggaatcatgctgtctcagcagtcatcttcatggggctgtgagagaatcatgtgagatcaggagtcgcacacatgacgagtcaacatggagagaccctgggttgatgttagtcggtggactgttacgttgttcgccctttgactcaaagtgtgaaaggtggaatcagccggactgaagtgggcaacttgcttcctctttccaagttttttgttgcctcctttttgtttttccttgaaaatttatactaaatctcaaatatctggggttgttagtcctgtccattgatgagaaaaagaatttgaccataatttcctttgtagatcataagatgccaagtgtaagtttctgtccacagtaatgatgatgatgttaaccagtgcacatttgatggtttatggagctgagtgttttgtgagtgattgcctttaatacttacaatcctgtgaggaagataatattgtccccatcttacagataaggtgactggagtacagggagatgctaagttgctggaccaaggtctttttttttttttttttttttttgagacggagtttcactctcgttgcccaggctggagtgcaatggcaggatcttggctcaccacaacctctgcctcctgggttcaagcgattctcctgctgcagcctcccgagtagctgggattataggcatgcaccaacacgcctggctaattttgtatttttagtagatatggggtttctccatgttggtcaggctggtctcgaactcctgacctcaggtgatccacctgtctcagccttccaaagtgccgggattacaggtgtgagccaccgtgcccagcctggatcaaggtcttgtagctagtaggtggcagtgccgggattcactcccaggcagcctgatcccggaacttgtgcctttacctcctcccagttgacctcttattcatattcattttcctggctgttagggagagaacgtggcatgactcaactcccatgataacggatgtctgctgaccccagtttcatgggaggttttttttttttttgaggcagagtcttgctttgtcacccaggctggagtgcagtggcgcgattttcgctccctgcaacgtccgcatgggaggtatttttatacctatttaagatcaacgtgcctcctcttctgtactctgttgtctgcagctgtcttctcttgttgctggtatgactgcccatcagcaagcactccagacttttccctttttttgggcaggtctgaactccatactctttgcgattaacatcgacaacaaggatttgaacgggcagagtaagtttgctcccaccgtttcagacctcttaaaggagtcaacgcagaacgtgacctccttgctgaaggagtccacgcaaggagtgagcagcctgttcagggagatcacagcctcctctgccgtctccatcctcatcaaacctgaacaggagaccgaccccttgcctgtcgtgtccaggaatgtcagtgctggtgagtgggaacgggtgctcgaggcggagcagagggaatcagaatgtggcggatggggtggacatatcttgtcatctgaaagtcattccaaggggaatggagtccagtgcacttgcgttttccatttgtgtttctgtttctcatcctcattcactctgaaagggctctgacggccttacctagatgcgagaattgccgggtggaaaaatgaacagctcaaccatagcaaacggaaagtgagagtgtgagagacaccgggagccagatgacgttgatcctcattcattaattcctttatttgttccttcatcgtattctgtgtgttaggcggtgagccgaataggaaagacagattaccagcaggtagcctgcagtctcctttgggatgggtgtgggtgggtagttcatgacaaaatatataatttatgatccttaggataaaagggatgaaagccaagcatagactgctatggggaacatctgccattggtcttgcctctgactggggatggcatttaaggcctcaggaaagagaggagttgtcaggtttgactctaggctctggggaagcaaaagagttgattcaggccggtcgtggtggctcatgcctataatcctagcactttgggaggccgaggcaggaggatcgcttgagttcaagggttctagaccagcctgggcaatgcagtgagaccctgtctcaattttttaactttttttttttttttttgagacagagtctcactctattgcccgggttggagtgcagtggcatgatctcagctcactgcaacctccacttcccgggttcaagcaattctcctgcctcaaccttctgagtaggtgggactataggcatgtgccaacatgcgtggtttctttttgtatttttagcagagacagggtttccccatgttggccaggctggtcttgaactcctgacctcaggtgatctgcccgccctggcctctcaaagtgctaggattacaggcgtgagccactgtgcccagcctgtttttaaaaaattttaattaaaaaattaaatataaaaaaagaaagttgattcagttaagattaatttggtgagaagttttcaataccctttgattcctttgggacattaagatgttactacagcaaaattggaaattttgttgtagtatgtatgtgtatatatgtagagacagggtcttgccatgttgcccaggctggtcttgaactcctggcctcaagtgatcctcctgccttggcctcccaaagtgctgggattacaagtgtgagccactgcacctggttgaaattggaaattttgggcttaagtacttagtattctcaaatctctgaaacaaggcagtaactgtggccatccctttggaattattcatggtgaaagtgtagagtcccatggtgtctttggtacacagtggccttgtctgtcttgccctgtgcttctccagcagagaccctgcacgaaccttgtagaagatagggctgttgacagctttgtgtaacagacactgaaatttctacacccacaggagtagaagttccacccatttttggaactctgcttttgaggtgatctcagagttgtgctataccagtgaggcctcaccgcatcacacattggtttagacagattggatttttggaattggctcaaagtgtcttacatccaagtgtgatgattaaaataggggcacaaagtgtcttctgtgagtgctggtcactaaggcaagcttgatttctttttcagttaacatttgctatataacaagtgatttaaaaatgtagcggcttaaaaccactgcagttcgttacttttttgtgtgggttggcatggtggctcttctgctgggctctttcggctcactcatgggagctggtggttagattggaagatccaagatggccccatccacgtgtctggaatcagtgctggggcagctcgggttctactcatagcctctcatcctccagtcggctgaactggcttctttatatatggggtcagggccactgtccaggaaagcaaaggcaaagctgagaccttttaacacctagctactagaactcacacagtgttatttctgccactttttttttttggagaaagagtctcgctctgtcacccagactggagtgcaatggcgcaatcttggctcactgcaacctctgcctcccgtgttcaagaaattctcctgcctcagcctcccaagtagctgggattacaggcacctgccaccacgcccaactaattttttttttttttgtatttttaatacagacggggtttcaccatgtttgccaggctggtcttgaactcctgacctcaggtgatccacccgccttgacctcccaaagtgctgggattataggcgtgagccaccgcgcccggccctttctgccacattcttttggtagaagcagggcatggtggctcatgcctataatcccagcaatttaggaggctgaggtgggagtattgcttgaggccaggagttttgagactagcctgggcagcacagcaagacctcatctctacaaataataataaaattagctgggtgttgtggcatgcacctgtagtcccagctactcaggaggctgagggcagaggattgtttgatcccaggaatttgaggttacagtgagctatgattgcaccattgtactccagcctgggcaatagagcgagatgccccaactcttaaaaaaaaaaaaaaaagcagagcactacgccagccagattcaagagggtgcagaaatagacatcacctctggctgggaggagccacaaagatccattgcaaaggggcattgcacaggaatggcaggagtttgaggctgctcaacccttgactacaccccccagctggttctcctggtctcatctaccagctatgagaatattttccaaagtgaagcattgaagatcattttggtaatggtagcatccttcgcatcaaagtgactgcttagaaggaacagtttcaagatgtgctctgtggtgtgtttatttaaatcagaggcagaggcctgcgtccattctgctcaatcttctgtacacagattttcactgaggattttaaaaagtctgaattcatgttacagtgtatttctcactcgaatagtattttccataacctggaggtgagttggttccatcatccttttgtcttgcctcctttttcttatactgtatctttttttttttttttgccagatgccaaatgcaaaaaggagcggaagaagaaaaagaaagtgaccaacataatctcatttgatgatgaggaagatgagcagaactctggggacgtgtttaaaaagacacctggggcaggggagagctcagaggacaactccgaccgctcctctgtcaatatcatgtccgcctttgaaagccccttcgggcctaactccaatggaagtcagagcagcaactcatggaaaattgattccctgtctttgaacggggagtttgggtaccagaagcttgatgtgaaaagcatcgatgatgaagatgtggatgaaaacgaagatgacgtgtatggaaactcatcaggaaggaagcacaggggccactcggagtcgcccgagaagtaagtttgtgtgtaaggtggagtctcaccgtcccccaggctggagtgccgtggcgtgatctcagctcactgcaacctccacctcccgggttcaagctattctcctgcctcagcctcccgagtagctgggattacaggcacctgtcaccacacccagctaatttttgtatttttagtagagatggggtttcaccatattggccaggctggtctcaaactcctgacctcaagtgatctgcctgccttggcctcccaaattgctaggtttacaggcatgagccaccacgcccagccttcccttgcacttttaatgagggggttaagttcactgttttctctttctatggtattgggtaaaataggtctgcaagctttatatttgcccagggtatcattcattcttcaggtgttgatttaggagtgttatttggaaggagtattatttgctcttcccctgagaactgaaagaggggaaaggagtacatttgagggcacttaatacaaagttaatgtcagaatgtgtgccttgaaattcttgctttatacatacatctgtcattttcatttcacagggttcacagggtttcacagtctgatgagactgtgcctgttattgttttttatttttactctggattttccttgcatctgacttgccactagcacaggaagctcaggacgaaggcagcgttaggagaatagttgtggtatggtgacttctgtgtttatctgcaggggtgtgaatagccgtaacttgcctgcacctgctgccttaacagtggagttggccaggcgcagtggctcacacctgtaatcccagcactttgggacaccaaggtgggtggatcacctgaggtcaggagttctagaccagcctgaccaacatggtgaaaccccttctctacgtataaaaaaatacaaaattagccaggcatggtggtgcatgcctgtaactccagatacttgggatgctgaggcaggagaatcgcttgaatatgagaggcggagccaagatgatgccattgcactccagcctgggcaacaagagagaaggtccttctcaaaaaaaaaaaaaaaaaaaaagtcccccaaataccccaaataagctagttacctcttaggctttgtggtgcgcagtgccctcctaatcatgactactgcaaaatccagtccattaaagtgtaaaatgaggccaggtgcagtggttcatgcctgtaatcccggcactttgggaggctgagttgggaggattccttaaggccaggagtttgataccagcctgggcaacacagcaagactctgtctctacaaaaaaataaaaagtataaaatgaatatacagaaatgtatctttctatctgacctaaatcttatggtattgtttaggctgcagtatacccttagccctaagatttttgttttcatgttgttacaatattagggttttttttttttttctgatgagactgtgcctattattgttttttatttttactctagtcctcatctgcatggatgcttgtactagtagtgttaccttattgatcatctgagatatgccaggtgctgcagatgatttataccctatattgtaagacgtctagcagccctatgaggttcatgggtatcacctccattttacagacagaagaacaggattccatagggaggcaagatttgtgaaagccattggctaaattgagatttggattcaggtatgctgtaatccaaagcttatattgtcagtttttgttttttttttttgagacagagtcttgctctgtcgcccaggctggggtgcagtggcgtgatctcggctcactgcaaactccgcctcccgggttcatgccattctcctgcctcagcctcccgagtagctgggactgcaagcgtccgccaccacgcccggctaatttttgtatttttagtagagacagggtttcaccctgttagccgggatggtctcaaactcctgatctcgtgatctgcccgccttggcctcccaaagtgctgggattacaggcatgagccactgtgcccagctattctgtcaaatgtttttcatgtttctacttaattatgaatattgatttgttgatgtaatggttaattttgtgtgtcaacttaactgggctgtgggatgcccagattgaatattctgcttctgggtggatcagtggggatgtttctgggtgagggaagtgtttgaattggtggactcagtaaaggcgatagccctccccagtgtgggtggacctcatccaatccattgaaggcctgaacagaacaacaagtgaaggcagggagggattctttcctttccgcctgctagcttcagctggaacatggcttttcggccctgggccagggactcccactatctgctctcctggttctcaggcttcagacttggacttcaccacacccccagctttcctgggtcttcagcttgtggactgcggatcatgggacttcttggtccctgcagttgtgtggagcagttcctcaatataaacctgtatttgtatctctctgtctctctctcttcaggcacacaccccttggttccatttctccgcagaaccgtggctaacgcagttgcctttcagtcagatcaacatattatgacttgtgaaatgtttccccttttgttgggtatttatgctgatggtttttgtttttgctttttgttatcagcggatctcaaatgaatattttcacacgcaagatttttttcctacgagtgaactgtttgttagggcagcttttcagcagccttgttcttgctcatagggtatgaatgtttttgtacctggcatccaagtcttgtgacctgctgtgttattcagggctttctagagaaacagaaccagtgtggtggggctgaggcggacgttctgtgtgtggatgtgtgtagttccttctctgtcctgctctattttttctcaatttctacctctatctgtacctctaactccatttctatctctgtttctgtgtctctgtttcctttcttttttttttttttctgagatggagtcttgctttgtcacctaggctggagtacggtggcacgatctcagctcactgcaacctttgtctcctgggtttaagtgattcttgtgtctcagcctctcgagtagctgggattacaggtacctaccacaccccgctaacttttgtgattttagtagagatggggttttaccctgttggccaggctggtctcaaactcctgacctcaaatgatccacccacctcagcctcccagagtgctgggattacaggcatgagccaccacgcctggtcttatcttgatttattttaaggaattggctcatgtgattgtggggctgggaagtccaaaatccacaggttaggtgtgtggactggagacccagggaagagttgcagttcaggtccagaggcaatctgctggcagaatttcttcttcctttggaaggtctgtctttttcctatcgaggccttgcactgcttgcatgaagcccacccacattatgcagcgtaatctggttcacccagaatctactgatttaaatgttaatctcatctaatagaaacagctagaataatgtttgaccaaatacctgggtattgtggcccagcaaaattgacacatacaattaaccctcacaagtgcctttattcttttttttctggaacagagtcttactccatggccccggctgtagtgcagtggtgcgatctcagttcactgcaacctctgctcccaggtttaagcgattctcctgcctcagcctccagagtaggtgggactacaggagtgtgccactatacccggctaatttttgtatttttaatagagatggggtttcaccatgttggccaggcctgtattgaactcctgagctcaagtgatccacctgcttcagcctcccaaagtgctgggattgcaggcatgagcctctgcacctggccatgtgcctttactttgtaatctgggcctttgaggagatgctgcttgctgatgccactgagtgtagccccatgggtgaggctggtgtgtgagccaaggcagcccccagcattgtgtgtaaatgcccaacacagtgcagggtgaccttcacttggcctgggccctctgaagccagagggcctcctgcagactctggacagctctccccggcattaagagggatcttgactgacccttccacagagcagcctggggaagacacagcggagtgatgggatggcctgctgagtaatgctttgattttgattctaagctagtgttcacagggaaggttgagggggctggtgcacagcagatgtgtgaggggaatgcagccagaccaggagaagctcactgtggattgccacagtgtctggcagagtctgctgccctgttgtctttaagaccctctgttggtcaaagttaggcttactcattggtttactggtcattaacccattctttgatgtctgaagaagtcttgtttcttctgcctctgtatttatcataagtattagctttgcgttttgtatttttctttacaagggatagtatttttattacggtcaggttttgttcttttgttctttttttgttttgttttgtttctttgtttgtttttttgagacaggtcttgctctgtcatccaggctggagtgcagtggcctgatcacaccctcaactcagggaactcctagtgtcaagtgatctccctgcctcagcctcctgagtagctaggactataggtacatgccaccacgcccagctaattttttatagaaatggggtctcaaggcattgctcaggttggtcttgatttcctggcctgaagtgatcctcctatgttggcctccctgagtgctgggattacaggcatgggtcactgagccaggcccagatggggctttttaaatcactttatatgtgctctatgataccggtagggaagtagggggaaacataattcagaaaggactacaaacatatgctgtgtctcgctattctgcatctcactagcagttaagcaaatgcaaagtgaaacaagactccatattttgcccatcatatttgcggagaccttgggttggcgccctggtggaagggaaagatcttgctgtcagtgagtcctcagttcctggcacatcccatagcatccacttggtgtctgtgggatgaatgaggctgcagggatggtgcacaggggctgacctcatagacagctggaagcagttgagctgggagcagttgatagccatgggggaaagcagtttgacaaactggcatgaacttaaggatgtttatcccacttggtttagcagtcccagtgcgagaagcagcccagagaacataccctcgattcagggaaaagttgctacatctagataccaaagttcttattcagagaagcagaacactggagttgacctaaatgtgcagccacagggggacggttaacagcagaagattttatagtttaagccttgacattttaacatttaggatctcaaacatctcaaatgatgtttaagagtgtctagtgttatgaagctgagctaatgagtacatatatacatacatatacatatatatatatattttatatatatatttttttttgagctgggttctcgctctgtcactcaggctggagtacagtggcacaatcttggctcactgcaatccctgcctcctgtgttcaagcgattctcctgcctcagcctcccaagtagctgggattataggtgaccaccaccactcccggttaattttttgtatttttagtagagatggggtttcaccatgttggccaggctggtctcaaaactcctgacctcaggtgatctgcccaccttggcctcccaaagtgctgggattacaggtgtgagccatcatgcctggcctaatgagttaatattgaatggaaaaaacaagataaaaaactcaacattttgcttcattacaactgtgtaaagaatagtccgcacagcaggaaagaaaaaaagacatgtgggaaactgagtctgacacagtaatgttttggataatgtggctgttgggtggtttattttttctctctcttcttttgggcattttctaagttttcaaataacgtgtgttaattgtcttgctgaggagcaacagttgtaataatgagtggttttaagccaatcaaggcaccagatactgaggcagtgtcagcttcaggaatctttaatgtcactcattttgaggcagtagcccttggggcccactggtgtttttttttttggtttttggttttttttttttttttgagatggagtctcgctctgtcacccaggctggagtgcagtggcgggatctcagctcactgcaacctccgcctctcgagttcaagtgattctcctgcctcacccttccaagtagctgggattacaagcacccaccaccacgccctgctaagttttgtatttttagtagagacggggtttcaccatgttggccaggctggtcttgaactcctgacctcaggtgatctacccgccacggcctcccaaagtgttgggattacaggtgtgagccacagcacccggcctgggtttttttttttttttttttttttttttctctgtggcccaggctggaggaagtggtatgatctcagctcactgcagccctcgacctcccaggctcaagggatcctcccacctcagcccctccagtagctgggtctacaggtgtgcaataccatacctggctaatttttaaattttttgtagagacagggctcgaactcttgggctcaagtgatccttctgcctcggcctcccaaagtaccggaattataaatgtgagccactggcctggccagcaatctttaatgtaactcattttgaggcggtggtccttggggctcacttctcgggtttggaacctcatcctcttggggcctggcttcaccttgtacttgcatatgttgcggggaagggtcaagaattatcttagaaaccagcagaacatcgcacctgccctgaggcagtggagtggcctagaaaggactgtctgcttttgctgccttctcctgaaagggcgcccctgaccacctctgggtgccggctccgtggtcaccagtggccaggtcagagcctcaggagggcgcctcttgacagattccagaggcacagccaaggtcatctggttctcccccaggttgggctcctgccaggacagtcgcgggagcggctcttcttttgcccccaccctgctgtctgaaagcctcattgtggtatgggcatggttgaatgatctgtcttgcaaaattctgctaggattatttcctcctgtgcttctcactctgtgccacatgtctggccaaaagctagagagggctgaaaggagacttctacctgacaagcctctaaaataggagctggcaatccctgcctgcggaccaaacccgcccccaagcagtgaacagttgttacatttttaaagagttattaagagacaccaagaaagaagactgtgtcatgaagcctgaaatatgtactctctggtctattacagaaaatatttgttgattttagagtagctctaacataaagacaaactatataagtaatgtcacttgtgggcaggagacgactcggtgcacttgagtttggaagacctgggctccagtcccacagccttggttctgttgcttagtgctgatggccttggacaagccacacactttttcttcttttgcctcccttccctttgtctgcccccgcacttcccttcttaagtaggtatgattatgatctgctttggtcttctttatctactgagatacagaatgatgtttaaaccttacagtacagctggctctctgcatccatggactctgcatccgtgagttccgcatctatggtttcaaccaactgtggatcaaaaatattaccaaaaaaaaaccaataaaaataatacaataaaaatacagtataacaactatttacatagcatttggattgtattaggtatcataagcaatctagagatgatgtaaagtacatatgtgggaggatgtgcttatgcaaatactacaccgttttacatcagggacttcaggctaggcgaggtgtcttatgcctgtaatcctagcacttggggaggctgaagcaggaggatcgcttgaggctaggattttgagaccagcctggacaacatagggagaccctgttttcacaaaaaaacaaaacaaaacaaaaaattagccgggtatggtggctcacacctgtagtccaaactcctcgggatgctgaggcaggaggctctgccaaatcccaagagctcaaggttgcagtgaactatgattgtgccactgtactccagtgtggacaacagagcaagactccaactctaaaacaaaacaagggactttgagcatcctcagatttgcaggggttttttgaaacggttgatacagatgtaatgcagatactgggggacggctatactgcaaaaatacctccaggtatttattaacatttcttgattgctcagaggcaagtgctgcaggggcaattactcccaaacaaacccaaccacactgcctggcgtttcgaagatggcacgcattagagatttgtactttgtgggtaaggtgacagtataacagatcatatgagcatggttaataattgagccgactccctttcttggaagggacccagacgtgactggtctgattctgtccttttacccacgaggggctcagatgcagcgaggcggagcaacgctagccctaggtcaggtggctgctgtcatttcggaacgtggagcagatggcctgtgatgcatgtgctgtccccttccccaagcctttgtccctcctcttcactcggtggcttgggcttcctccagctcccctcctcaagccctgcttcttccaggcagccttccatgaccttcctggaatgagctttctccacaatctgagatgccatttacagcttcttgcaggattatttggttcatgttcatgccccccaacagactgcaggctccctcagggcaggatcaacagtattcactggctcttttgccaccagtagggagcacagtgcctggcatataataggtgctcagtaaacactggttgagagaacaaatgcaagaggtctggatctggactccacgctctacctcccagcccacacctccttctgttctcagccctgccttggcctggttagttctcaggagggtgctgtggatgcttgttggtgagtcatgcggcctgtgggctctttggcctgtcctgcagctgtattctttcaccttaggccactggaagggaacacctgcctctcccagatgcacagctgggctccgctgaaggtgctgcacaatgactccgacatcctcttccctgtcagtggcgtgggctcctacagcccagcaggtgggtgtctcccgattactcctttcctccaataagagctttggcttcgagaaccagcaggaatgtctgagttccctggacaggtaggaatgggagccgggaggcacgggagtcggggtgtggttcagggccagggggagctcactgagatgcagaagtgagagagggcttggcttctctccctgaacctgggtatcctgaggtgctctccgtggagtgagtgttgggctgaaccagctggcaagtcaccagggcctgcaggcctgtttttctcccttaccagtggcccgttgaacttggtcgtttaaaagctgaccacaaatagtgaccacgattttgcctctttggagatgcaagaaggtaactgaacccctgtctgtaaaggccctgccaccctgtgcagaaaagtgcttggggatcaggaagtagcttggttaaaagctgtttctgggctgggtgcgatatctcatgcctgtaatcccagcactttgtgaagccgaggcgggtggatcacctgaggtcaggagtttgagaccagcctggccaacatggtgaagccctgtctctactaaaaatacaaaaattagctgggtatggtggtgtgtgcctgtagtcccagctactcacgaggctgaggcaggagaattgcttgaacccgggaggtggaggttgcagtgagccgatatcgtggcactgtacaccaccctgtgtgacagtgagactctgtctcaaaataaataaataaataaataaataaataaataaataaataaatatgtctctggtatgggtaagcatttttgcaccattccacacggttgagcacgtgcccgtgtggtttgttattgttttctttagtgcaggtcatggggaggacgtggttgatcccagctggcctgtggggtgcagtgtaatgcagctggcacagcatctggctcagagaagtgcccagttgctgtccctgccctcagaacaccgctgggtcagagaagacttggcccaaccttcttaggcgcctcctcgttttcttaggaagtgaatgtgccttctctgggcccagatttaggaaattatgactggagcccactaatcactcaggaagctgttgaaattctgaactggggtgtagattcttcctgtcacttggcagggagcataaacctactcaaactagctgaagcacagaggcagggcggggacagtcactggcagcaggacggggccagtcagatgcagtactagctctagaaagttgagtaagcctgagtgcattactgctctgagcgtcagcattcctggctgttaaatgaggctgagtgcttcctgtctgtcagttgctgtgtcctcatctggaaaatggggatgacagtgacaatgagagccagcatttgcaaagccaaaggagccctgcactgcagtgtggctgaccctgatgaactcatctgctcttgagcacagtcctgtgagagtggggggtgtgattatatcagctacctttgagatccacagtgaaggcgccttgagttaatctggggaaggtgccaggcacatgccaaggcccctggtgagagcttcagggacatcttgtccatggcccaggagctggggcgttggcatggagggggctttcctgacttggtggggtgctgtcatctttcttatgtggcctccctccacttcctgatgggggtctgcccacctcttcttttcctagtccatcttttttttttttttttttttttttttgaggtggagtctcactctgtcacccaggctggagtgcaatggcatgatcttggctcactgcaacctccgccttctgggttcaagtgattctcctgcctcagcttccagattagctgggattacaggcatgcaccaccatgcccggctaaattctttttgtatttttagtagagatggcgtttcgccatgttggccagactgatctcaaactcctgacctcacgtgatccacctccttggcctcccacagttgctgggattataggcatgagccaccgtgcccggccttttctagtccgtctttgctccctgttcattctcatgccctccttggcccacaccatgcctcagtcacatgaccttccataccaactggaatttctcatgggtctcagttgaggtcccctaaaagtgacaatctcgtaggcctagctcatgtttgcaggccaggccaccgaagtcctgcatttctagaccatccatggtccaaatagccaaaggttacggggttggtgaccttgctgatgcctgttcagcggcagtgtagatgcaggcaggtcatctgaggaggggcaggggctgggagagagcaggtggtcccaggatgtgtctaggacccctggggagttttgaatgtgtgttcacaggctctgtctcatgaatcaatttcctgctcaccttgtcccgttccccatggaggggtcttgtagttgggttcttgaattattgtggaaccgtgaggtgcttgcagtaggtggtctgattgttttggcagctcctttgccgcttagctgggccccctgaaccatcagacatccgggtcagctcctttgccgcttagctgggcctcctgaaccatcagacatccgggtctcctttttcgtgcatgttgggctttggtcttagagaacccagagctcttcctgctcttctgggctttctgtagcaagtgtgtccagggaacgtagctccccatcagcctctagagtccttgcagatttcctgtggtcccacacccggctgtcagctcgcagagtcagctccatcttctcactgctgatgggacccgagctccagctgatgtcgaatgcactctctggagatgacgtgtgccggcgtcagccagcatttcccttctctgcagtaacgatgctgtcagggggcttgtgagctgggacagcccaggggctgcgcacaggggcaggacatggcatagggagaaacattattccaggactgtgtcaggatgttggactcagagccaggggaatgggtagcctgattgggacgccaggttgcatcaagtcccttctgtcctgatgccccatttccatgggaggtgtggggccgactggtgccaagactctgcctgcctgcccaggtggccaccgccaccatttctcctgagactccattccttttgctctgtttctgccttttgtcccttctgagggacatcttccttccttagagatattctgacattccctctcattctggagccacttcgtcttttaatggagacttcccacatggagggctcctcaccttaggagacttttgtcatctttgaacacgctggtgcctttgcagtcactgacagtggggatagttagagaaggcaaaggcactggctgggagaggatgctttctgcagctgagtgttgggagggagaaaggagcaaagaagggggaaccctgaaaggagttctcttgaatcttggaagagataactctgtggtttagggaggagttttggagttgcttttcttgggtgacagagccattcacagaaggggacagcaccccaggttgcaagaggagaccccagacaagcaaatgaggactggggaccatgcgtggttcctctgggagtatgtggtgtctatacctgagcaaagcaaattcaccagcattgctttccagttgcaaggaagggagagctacccaggtttattttgagtgggaatagtaaacgggtgaaaaatcacctgtcagtacaaggtgatatgactgctcatcccttcattgagggtcctgtgtttagtattgggttttaggaaatgcacaatttccaagggctttcttaggttcctttgaaaccttgggtcctcaaaccctttgtttccccatcaagtctaaagttctatttctccttgtcctcacgttggatcttggaagttgtttgttgaggttgaggacagactgtggtggctctgccataatctgatgtgattggttttagcacttagctcttagtgggcagttttactgttttggttgtcagtgttgcggtggctgggcggacactgccctggttgtgcttcccagtcagcttatacgggttgtgtgctgtttggggttcctggttttctttattcagtcttcccactggatcactggatgcaggcctgtatgctaaagtgggtacaggctcagctctgccattggacggaccagggttcaaacctttgcacttgttagttctgtgatcttgaacaagttgcttaaattttcgggatccatttcctcatccgtaaaattagataatggtatctgtcttgggggccttaaggatgagacggtctatgctgtgtgcaccccagagcgtcaggcccacaacaagtacaagccattcgcggttgtgcatcgtgaaggggcccgtgggcaatcacctgggaccgtgtggacattgtatcctcactgagcgctctcattgaaggctgggtgggtccatgcctttgccccagctgtggatttccactctgcatgttgagtccctgtctttgcttcagggaatgtagtctgactctgcatgagttagattagcaaggatgacagggaactggggcgtctgctgtagaaggcctcttagatggtatggagcctttggaccacggggcagtggacacgacttgtgagccaagaggaggaggtcattttgggggcactgagcagtcttggatccccctggctctgtgatgggatggagggtgggtgccgtgctcttgtgagcttacagcctagtgcgacataagatggggttgtgagggtcaggatctgttggtaggcacagcggggtatcccagtagagttttctagaaggcagttagagatgtgggactgagattcaagacaggtctgggctagaggtgagggcttgagcactgtcgtcttcacggaggtgagaactgtagccaagaccttgccagatgtgccgagggtgacagagggccttggggccatgattcagggccaccttcactcaggaatcagagaaaagatggtggggaggagggccggagattagtgttgggaaggttgagagaggggagcgccaagtaggaggggatggtggggtgggggctgagggaggggttccttgggccattccagttgaccaggtgggaggatgaatgcccgaggtagccaggatctgttatggggtgagttgatgccaccctcactgagcattctcattgagttttacatgcgttaagatgtaacattcgggagtctgaggcaggaggattgcttgaggccaggagtttgagactggtctgggcaacatagtgagaccgtgtctctaaaataaataaataaataaataaataaataaataaataaataaataaataaataagcaggccagtcatgagggtgcatgcctgcagtcctagctactcaggaggctgaggtgggaggctctcttgagtccaggagtttgaggctgcagtgagctataatcgtgccactgctctccagcctgggtgacaggaaaaccctgcctctaaaaaaagcgggaggggaagtggacttgaacttcttgagaatttggagtcagtaaataacttgatggagacagcaaggtagaagaaaaggttaaaacaattttttttttcctggtaagtttccctgaagttcagcccctacagagctgggggttcttggggcaccttgagtaagccaagcaaagatggagggaatggcatggaggatggatgaggaaggcaccgaggcgtgctctctccagcaccatgttccttgtccccgatgcacggctggttccatagtggtcattcactaataagtttctttttctttttctctttttgagacggagtctcactctgtctcccaggctggagtgcagtgacgtaatctcagctcactgcaacctccaccttctgggttcaagcaattcttccacctcagttttccaagtagctgggattacaggcgtgcactacctcgcacagctaatttttgtatttttagtagagacggggttttgccatgttagccaggctggtctcgaactcctgacctcaagtaatccacctgccttggcttcccaaagtggtgggattacaggcgtgagccaccgcgcctggcccaagaagtttcttgagtgagcaaggtttctcctgggtgatactggccttaatgtcaccatgcagcccaaggcttatggatttgcatgttttcctggaaggagacttgagcatttatgaaaattgttcaggtccctagcccgttagttccagagactacttatggccccagctcttgtgaatgcctttcctaaatgcacttaatgcagggaaaattggcctttttagaaagccgcagacattgtcaggaattagaccatgctgccctctactgtctgattcaaggcactacaagcaggagcagttttgtcttaacagcaagctgattcattatacccggtttctggccctggttctgaatatggacttcatgcataattccaggtggctcaaggtcgaaaatgtcacaggccaggcacagttgctcacatctgtaatcccagcactttgggaggccagggcggaaggattgcttgagcccaggagtttgagaccagcctgggcaacatagtgggacccccatctctacaaaaaaaaataaaaaataaattagctcggcatggtggcacacacctgtagtccctcccaggtacttgagaggctgaggtgggaggaccactggagcctgggaggttgaagctgcagtgagccgtgatcacacaccaccactgcactccatctcagcctgggtgacacagtgagaccctgtctcaaaaaaaaaaaaaaaaaaaaagtcacaggttaaggggaagtatagggcttttaaaaaaaaatttttaatggagcttcgctcttgttgcccaggctggagtgcaatggcacgatctcggctcactgcaacctctacctccagggttcaagcgattctcctgcctcagcctcccgagtagttgggattacagtcgtgcaccaacacgcccagctaatttttgtatttttagtagagatggggtttcaccatgttggccaggccggtctcgaactcctgacctcaggtgatccacctcccaaagtgctgggattacaggagtgagccgccatgcccggccaagtatagggctttctgcttctacagtgactgatgccaagtctgagattatctctgaacaacaggaaacagctgattaaaatccagcttgcaggagagatggagaaaaatttcttagtcaagtgatgtagcagatgagccaatgtctgcattgtgtctttgtcttatggagaacatgtagtgagaaaagtgacctctttctgtgattgctctctctgcacagatgcccccctcggaagcctggagaacgggacaggaccagaggaccacgttctcccagatcctggacttcggtacaggttaatattgagaaacccagttgcctgtggcattaaaacatcctattcacagctgtgcattttattcttttttaaagataggagtgcacctgctaggattaaagggcaagggtttacttcacatttatgttcagatttagtctttttttttgagatggagcccggttctgttgcccaggctagagtgcagtggcgcagtctcggctcactgcaaactccgcctcccgagatcaagcgattctcttgcctgagcctcccaagtagttggaattacaggcacacaccaccatgcctagctgatttttttgtatttttagtggagatagggtttcaccacgttggccaggctggtctccaactcctgacctcaggtgatctgcccacctcggcctcccaaagtgctgggattactgatgtgagcagatttagtctttacatcacagaagatgcagttgccaagggtcttagatcattactgcctcagagagactgtataagagatggtagatgacgaatgtcaacaccttttggggcatatctgggtgcctcctctattgttattttctttttttctttttgagacagtctcgctgtgttgcccaggctggagtgcggtggcgcaatctcggctcaccgcaagctctgcctgctgtgttcacgccattctcctgcctcagcctcctgagtagctgggactacaggcgcccgccactgcgcccggctaactttttgtattttcagtagagatggggtttcaccgtggtctcgatctcctgacctcgtgatccgcccgcctcggcctcccaaagtgctgggattacaggccaccgtgcccggcctgttattttcttaatttaaatatttgttgatatttgataacaagatttgaccatcctagtgttgtatatttaagccatttagatattacatagtatttgtgaagggcttagtatgctgtctggcatgtattaagcactatataggttttctttttgttttttcaaataaagtatctcaaggggaaattgagttctcccaagttgttggatgctttttttttattatttaagttttagggtacatgtgcacaatgttcaggttagttacatatgtatacatgtgccatgctggtgtgctgcacccattaactcgtcatttagcattagctatatctcctaatgctatccctcccccctccccccaccccacaacagtccccagagtgtgatgttccccttcctgtgtccatgtgttctcattgttcaattcctatctatgagtgagaacatgtggtgtttggttttttgtccttgcgatagtttaccgagaatgatgatttccagtttcatccatgtccctacaaaggacatgaactcatcattttttatggctgcatagtattccatggtgtatatgtgccacattttcttaatccagtctatctttgttggacattcgggttggttccaagtctttgctattgtgaatagtgccacaataaacatatgtgtgcatgtgtctttatagcagcatgatttatagtcctttgggtatatacccagtaatgggatggctgggtcaaatggtatttctagttctagatccctgaggaatcgccacactgacttccacaatggttgaattagtttacagtcccaccaacagtgtaaaagtgttcctatttctccacatccagcaccttttgtttcctgactttttaatgattgccattctaactggtgtgagatggtatctcattgtggttttgatttgcatttctctgatggccagcgatgatgagcattttttcatgtgtcttttggctgcataaatgtcttcttttgagaagtgtctgttcatatcctttgcccactttttgatggggttgtttttttcttgtaaatttgtttgagttcattgtagattctggatattagccctttgtcagatgagtaggttgcgaaaattttctcccattctgtaggttgcctgttcactctgatggtagtttcttttgctgtgcagaagctctttagtttaattagatcccatttgtcaattttggcttttgttgccattgcttttggtgttttagacatgaagtccttgcccatgcctatgttctgaatggtaatgcctaggttttcttatagggtttttatggttttaggtctaacatgtaagtctttaatccatcttgaattaatttttgtataaggtgtaaggaagggatccagtttcagctttctacatatggctagccagttttcccagcaccatttattaaatagggaatcctttccccaatgcttgtttttctcaggtttgtcaaagatcagatagttgtaggtatgcggcattatttctgagggctctgttctgttccattgatctatatttctgttttggtaccagtaccatgctgttttggttactgtagccttgtagtatagtttgaagtccggtagcgtgatgcctccagctttgttctttttggcttaggattgacttggcaatgcggcctcttttttggttccatatgaactttaaagtagtttttttccaatttgtgaagaaagtcattggtagcttgatggggatggcattgaatctataaattaccttgggcagtatggccattttcacgatattgattcttcctacccatgagcatggaatgttcttccattcgtttgtatactcttttatttcattgagcagtggtttgtagttctccttgaagaggtccttcacgtcccttgtaagttggattcgtaagtattttattctctttgaagcaattgtgaatgggagttcactcatgatttggctgtttgtctgtgattgttgtgtaagaatgcttgtgatttttgtacattgattttgtatcctgagactttgctgaagttgcttatcagcttaatgagattttgggctgagacaatggggttttctagatatacagtcacatcgtctgcaaacagggacaatttgacttcctcttttcctaactgaataccctttatttccttctcctgcctaattgccctggccaaaactttcaacactatgttgaataggagttgtgagagaaggcatccctgtcttgtgccagttttcaaagggaatgctttcagtttttgcccattcagtatgatattggctgtgggtttgtcatagatagctcttattattttgagatacgtcccatcaatacctaatttattgagagtttttagcatgaagcgttgttgaattttgtcaaaggccttttctgcatctactgagataatcatgtggtttttgtctttggttctgtttatatgctggattacatttattgatttgtgtatgttgaaccagcctttcatcccagggatgaagcccactcgatcatggtagataagctttttgatgtgctgctggattcggtttgccagtattttattgaggatttttgcatcaatgttcatcaaggatattggtctaaaattctcttttttggttgtgtctctgcccggctttggtatcaagatgatgctggcctcataaaatgagttagggaggattccctctttttctattgattggaatagtttcagaaggaatggtaccagttcctccttgtacctgtcgtagaattcggctgtgaatccatctggtcctggactctttttggttggtaagctattgattattgccacaatttcagatcctgttattggtctattcagagattcaacttcttcctggtttagtcttgggagagtgtatgtttcgaggaatttatccatttcttctagattttctagtttatttgcgtagaggtgtttgtagtatactctgatggtagtttgtatttctgtgggatcggtggtgatatcccctttatcattttttattgcgtctatttgattcttctctctttttttctttattagtcttgctaacggtctatcaattttgttgatcctttcaaaaaaccagctcctggattcattaattttttgaagggttttttgtgtctctatttccttcagttctgctctgattttagttatttcttgccttctgctagcttttgaatgtgtttgctcttgctttttttctagttcttttaattgtgatgttagggtgtgaattttggatctttcctgctttctcttgtgggcatttagtgctataaatttccctctacacactgcttcaaatgtgtcccagagattctggtatgttgtgtctttgttctcgttggtttcaaagaacatctttatttctgccttcatttcgttatgtacccagtagtcattcaggagcgggttgttcagtttccatgtagtggagcggttttgagtgagtttcttaatcctgagttctagtttgattgcactgtggtctgagagactgttataatttctgttcttttacatttgctgaggagagctttacttccaactatgtggtcaattttggaatagatgtggtgtggtgctgaaaaaaatatatattctgttgatttggggtggaaagttctgtagatgtctattagatctgcttggtgcagagctgagttcaattcctgggtatccttgttgactttctgtctcgttgatctgtctaatgttgacagtggggtgttaaagtctctcattattattgtgtgggagtctaagtctctttgtaggtcactcaggacttgctttatgaatctgggtgctcctgtattgggtgcatatatatttaggatagttagctcttcttgttgaattgatccctttaccattatgtaatggccttctttgtctcttttgatctttgttggtttaaagtctcttttatcagagactaggattgcaacccctgccttttttttgttttccatttgcttggtggctcttcctccatccttttattttgagcctatgtgtgtctctgcacgtgagatgggtttcctgaatacagcacactgatgggtcttgactctttatccaatttgccagtctgtgtcttttaattggagcatttagtccatttacatttaaagttaatattgttatgtgtgaatttgatcctgtcattatgatgttagctggttattttgcttgttagttgatgcagtttctttctagtctcgatggtctttacattttggcatgattttgcagtggctggtaccggttgtgcctttccatgtttagtgcctccttcaggagctcttttagggcaggcctggtggtgacaaaatctctcagcatttgcttgtctgtaaagtattttatttctccttcacttatgaagcttagtttggctggatatgaaattctgggttgaaaattctttaagaatgttgaatattggcccccactctcttctggcttgtaaagtttctgtcgagagatccactgttagtctgatgggcttccttttgtgggtaacccgacctttctctctggctgcccttaacattttttccttcatttcaactttggtgaatctgacaattatgtgtcttggagttgctcttctccaggagtatctttgtggcgttctctgtatttcctgaatctgaatgttggcctgccttgctagattggggacgttctcctggataatatcctgtagagtgttttccaacttggttccattctccccgtcactttcaggtacaccaatcagatgcagatttggtcttttcatatagtcccatatttcttggaggctttgttcgtttctttttattcttttttctctcaaattcccttctcacttcatttcattcatttcatcttccatcactgataccctttcttccagttgatcgcatcggctcctgaggcttctgcattcttcacctagttgtcgagccttggctttcagctccatcagctcctttaagcacttctctatattggttattctagttatacattcgtctaaattttttcaaagttttcaacttctttgcctttggtttgaatttcctcctgtagctcagagtagtttgatcatctgaagccttcttctctcaactcgtcaaagtcattctccgtccagctttgttccgttgctggtgaggaaccgtgttcctttggaggaggagaggtgctctgctttttagagtttgcagtttttctgctctgttttttccccatctttgtggtttcatctacttttggtctttgatgatggtgatgtacagatgggtttttggtgtggatgtcttttctgtttgttagttttccttctaacagacaggaccctcagctgcagtctgttggagtttgctagaggtccactccagaccctgtttgcatgggtatcagcagcggtgtctgcagaaccagggattttcgtgatccgcgaatgctgctgtctgatcgttcctctggaagttttgtctcagaggagtacccagccgtgtgaggtgtcagtctgcccctactgggggatgcctccgagttaggctgctcaggggtcaggggtcagggacccacttgaggaggcagtctgcccgttctcagatttccagctgcgtgctgggagaactactgctctcctcaaagctgtcagacagggacatttaagtctgcagaggttactgctgtctttttgtttgtctgtgccctgcccccagaggtggagcctacagaggcaggcaggcctccttgagctgtggtgagctccacccagttcgagcttcctggctgctttgtttacctaagggagcctgggcaatggtgggtgcccctccaccagcctcgctgccgccttgcagtttgatctcagactgctgtgctagcaatcagcgagactccatgggtgtaggaccctccgagccaggtgcgggatataatctcctcacgcgctgtttcctaagcccttcggaaaagcgcagtatttgggtgggagtggcccgatattccaggtgccgtctgtcacccctttccttgaacaggaaagggaactccctgaccccttgcgcttcccgagtgaggcaatgcctcaccctgctttggctggtgcatggtgcgctgcacccactgtctggcactccgtagtgagatgaacccagtgcctcagatgcaaatgcagaaatcacccatcttctgcgtcactcacgctgggagctgtagactggagctgttcctattcggccatcttggctcctccctttttttttttttttttgagacagtcttactctgtcgcccaggctggagtgcagtggcaccatcttggctcactgcaacatccgcctcctgggttcaagtgattctcctgcctcagcctcccaagtacctgggattacacatgtccaccaccatgcccggctaatttttgtatttttcagtagagacggagtttcgccatgttggctaggctggtctcgacctcctgacctcatgtgatccgcctgccttggcctcccaaagtgctgggattccaggcgtgagccaccacgcccagcctggtcataacatttttatgtagcctgggtgacaaagcgagaccctggatgcttggtggcagaactgaaatggacaccaaagtcttatgccactgccatccttgctgctattaccgttttcttcttctgtctctcctcttggctgtaatttggggtcccagggtgctattacatccttattttcaaacctagctctagagtggaacttcctgactaccgtaaaccatattagatgccatggtcttacctggaacagtcaagggttctgctctctcaaaatgacattgcttgtaggaagcttgtcgcagttagttcagtgtcagaaggaattggtgttgccagacccttccagggggtggagtctttttttgctatttattttagaaaatgtgactaggcatggtggcccatgcctgtaatctcagcactttgggaggccaaggtgggaggattacttgaggccgggagttcaacaccaccagtctgggcaagtgagaccctgtctttacaaataaaacaacaacaaaaattatccagatgtggtggtgcatgcctgtagtgtcagctacttgggagactgatgtgggaagatcacttgaacccaggagttcaagccttcagcgagctgagattgcaccactgcactccagcctagttaacggagtgagaacctgtcttaaaaaaaaaaaaattggaaaatgcaacagtaaatgaaaaaagaaaatcagtcttaaccctcaacttcattatgttgttgatgttttggtacttttcctcctagtcatggtgtgtgtgtgtgtgtgtgtgtgtgtgtgtgtgtgtgtgtgtatctctgttaaccatgtgatgaccgtgctgttctcaccaaagacactaaactttatttttcatgttgtaaattatttgtaaacatacagttgattcttattattcccagtagttgtattctataaagttgctatgaagactgaaccagtgctcctaggggaagtacatggttaagttgctttgaggctctggtcacacattttgtttttgagatgaactgttgctcttttgcccggggctggagtgcagtggcgtgatcttggctcactgcaacctctgtttcctgggttgaagtgattctcctgcctcagcctcccaagtagctgggattacaggcatgtgctaccacacccagataatttttgtatttttagtagagaaggggttttgccatgttcgccaggctggtctcgaactcctgacctcatgtgatccacccgcctcggcctcccaaagtattgcgattacaggcatgagccaccacacctggcctggtcacagcatttttatcaactgatcaacacataacctggttttatgtctgttcctgtttaaagacaccttgtttaatgtatgcagttgattcattaacattgaattcacagccagcagcactgtaagccatgcctgaatgaagcatctctaactcacaaattatctccatacggcacatcacagccttcctgtgcttaggaactgtcggcagtaccacttcagcactgtgcttggggacattttaaacaataaaatcaagtggaaaaaaaggccgggtgtggtgggtcatgcctgtaatcccagcactttgggaggctgaggcaggtggatcacttgaggtcaggactttgagaccagtctggccaacttggcgaaaccccatttctagtaaaaatacaagaattagtcgggtgtggtggtgcgggcctgtaatcccagctacttgggaggctgaggcacaagaatcgcttgaacccaggaggtggaggttacagtgagccgagatcacgcaaaagaaagaaaagtggaaaaaaaaatgctaaaaacatggcagtaaatagacagcaaagaggatgcttgtttacggtgtgagatctgaggtcccagctgttcgacttcagctgagattatgcacattagggagtgaaattattggcctctgcacgtgttcatgaatgattgtgaaagcacctcaagtattgactttggggttacaaataaattttagtgcgtagatgaatttccaaatacggaatctgcagataacgaggcctgactaatttccaatgactgcctctatcccttctagtagaggtaccggagtaaaccgacctctgctagtttttggaatggtgagggtgtgtactttcagtggccgagtgtaacttcctcctgcctgctttttcctagtgtggaagccagctctccaggccacggaagtcctctgagcagcctgttaccttctgcctcagtgccagagtccatgacaattagtaagtactttcgcagccccctccaccagctctgggatgacttctggcccacgtctcatggcggtgcctttgtgcttctaaccctgtgactgtgggttcacgtcaggtgtgtacgtccctggttgtagactggaggtgtggtacgtgcttgtggatatccagaaccgtggttaatgcgtggcgcttgggcgtgtgcgcgctaaagggcgtgcctcaggatggagcagccttgccgtagacttctgtggttccaggttttggggtttgcctcccataatgcagttagctacagaggacctattctagttggatttcctttgtaactctgaaggactcatttttgtaagtgaagaagaatatgtctctccaagatgattaaactttgctaatgatcaggcttcaactgtttccaactttactacctagaaaaagtattagagatatagcaaggaagactaggtttgaatggctttgtataacaaagaataaaccaactgttatgtaaactgacgggtgctcctggtatctcactggtggcttgagccagcatttgtcccatggcctcccctggaggcagagggggcacttgttcccaattaaaaaaaaaaattagcttttgttgctaaggaaggaagaaggcgtttgggaggcacctagcattttctgattcaagggtgaagcaggaagtgagcagacactatgtaaaccaacagttggtttattttttgtacacaaagccattcagacctactcttcttgaagttccggtggttaaggagatgtgatggaaatttctctctatccagaggtagatgggctggggctggtatgtggctccacggccatcagagaccgggactcctcctgtcttgccttgtagaccaaaatagccattttagctccagccatttcattctcattccaggcggcaggaaggaggagagagcagagagacttcgtctatttctacatataggattcaggggcctgagcttggatagggaaaaaaattacaatgtttttcatttagctctgggtgaaatatagtattttcttcaatcatgatcattctattttgatgtaattggtttcctttgtgatatggtatgttttatatattttaatacattttcctgaataggagcccatggttattcctagattacaaaatgggctcttggtacaaaaacgttgaagctcccccgaccttcactagaaggtgcttacagtataccactcgtgtcttgggccagcattcatgtcatggtcccccttggctgcagagggggcaattgttcttgataaaaaggaaattagtttttgttgctaaggaaggaagaaagagtttgggaggcacccagcattctttgattcaagggtgaagcaggaagtgagcagacaccgtaaggctgctgcgtgggaacggctggccgcactttttgtatgtgagcatgtgtggtttactgtggcgctgctcagccctgaactccgctgagcaggtgttaatagatcactcagtccatgggacacagggtgggtgagtatgtagctggctgcttttcacctgtcaatcttttgtttaccacagtactgttacttaccctatagtttactttattattcatttttatttatttatttttttgtagagttgaggtctcaccatgctgtccaggctggtcttgaactcctaggatcaagcgatccacccgcctcagccttccaaagcgctgggatgacaggcatgagccaccgtgcccggcctactacagtttacttttttttttttttttgagacagagtcttgctcttgtctcccaggctggagtgcaatggcacgatctcagcttactgcaacctccacctcctgggttcaagcgattctcctgcgtcagcctcccaagtagctgggattacaggcccacgcccggctaatttttgtatttttagtagagatggggtttcgccatgttggccgggctggtcttgaactcctgacctcatgatctgccggtctcagcctcccaaagtgctgggattacaggtgtgagccaccgtgcccagactgtagtttacttttaatgatgcacttaaacaaattgaattcctttattttttgaaaaaggaagctttatctcactactgtaaatggagagtcactatgagttaacgaaaccagcaggtcgctgtaaaatgaagacagtggaaggaaactattactaagtgtgcctggcgtggttgcctgccctgggttccgattgatacccactcttgttgttcaaaagagagatgagtgctgcttctttttggccccggcctgtggcaagtatctcagtcttcatactgctgggaagctctgtaaccaccagcaagaccagaagtggggtgatcagcagtgcaggaaagcccatttgggtgcagtccccgcacctagcccttttggaagtgcttctccaaaagggaattgtgccggaaaagtagggattgaaaccaaacagccacatcctgccatcaggatgctctttatggccccactgaccaagaaatcacagcttctgtactcagtgatgactgcttgacttcagttgaggacaacaatgaagttctgtagccaggcgtggtggcagatgtctgtaatcccagctactcgggaggctgaggcaagagaattgcttaaaccccgggaggtggaggttgcagtgagccgagatggcgacactgcactccagcctgggtgccagagcgagactctttgtctcaaaaaaaaaaaaaaaaaaaaagaaaagaaaagaaaagaaaaaaaaagctaaaataaaaatttcggggaaaaaaatttagggataaaaccttggtgaagttctgattgctggatttggtcacaaagatcatgctgttggtgacatccctggggtccgagttaaggttctcagagtagtcagtgtagctctcccttggtcctatgcaaaggcaagaaggaaagaccaagataatacattttgatggtgaaaacacagtagaaatatatttttataagccaaaggcaaagagatgtgtcagcgagtcacattaggtgttgaggctatcctgttactgaactgatggtaatggagaggactgaggatgagaaaagaagccactcctgtgacttgctgggatctaacgccacatcgcttcccagcacctatgattctgtctctgtgtgggtggcaccgtggtgtagatggacaagacttgactctggctgtgaggcacagctactgtaaagaacactgcgttttgatttatgggcattttttttttttaaaggacagcagccccgagatcatgcctgcgagcctttgtaggcaccgtaagtagggctgcaggcatccctgtgtgccctggcaggtgtctgacattctgtttcccaagagttcctgcggccggggctgaggtcccagcatctcagataaacacggtttgctttgtcagctgcgtctcaggtccacatagagcatggtgtctgggccttcctcagccgctttctgtctttgaggaagtcactggccttgcctgtgcattttcagtgatgacatacatgcccttaaacatgctcgagttaggccagtgacagaggcgtagattgtttttcttgttttgactcagacaattttttagaaactatatcattttattatttggcattttgagcaagtttgggacatatccagagcttataccttgaatctctgaagaaaaaaatgtcaccatgtctgcatttgagccttgatacttggtagaaacgtggtctgtggttaggattgtgtgtgggtggctgggacaaggggcttctgtcttctgcggtgcctgtacctttaggagtcttcaaggacagtgctgttgtctaccctggatgtcatccagcacagatgaggggtcaggaatcctagaaattttgagcgaagggtggttttcacttgtgttttcccaccctgccatcacctcctgtgtcacatgcaagaggagtaagaagagtgggtctgtctgggtgtccggggtatttgcttgggctaccataacaaggggccacagatagggtggcttcaacaacaaaaacttattttctcggccgggcacggtggctcatgcctgtaatcctagcactttgggaggccgaggtggggggaatcacttgaggtcaggagttcaaaaccagcctggccaacatggtgaaaccctgtctctactaaaaatacaaaaaattagcatggtgtggtggctggcacctgtaatctcggctactcgggatgcagaggcaggagaatcgcttgaacctgggaggcaaaggctgcagtgagctgagattgcaccactgcactccagcctgggcgacagagcaagactatgtctcaaaaaaaaaaaaaacccctcaaaacttattttcttacagttctggaggctgaaagaccaagatcaaggtgccagcagggttgatttctggtaaggcctctttccttggcttgcagacagccaccttctctctgtccttatgtggcctttcctctgcaggcacatcctggtgtcccttatctcttcttataagggcaccggtcctgtgggatcagagccccatgcttatgaccttattaactttgattacctcattaaggccttgtctccatataaactccgattgggagttaggtcttccactggttcattagggaagggatgcaattcagtccatagcatgagttgtcccaggagtgagtgtcgcaaatgccgtcccagttcagatggagcatcccattgctgcatgtgaagcacctgagattctcctctagagcagtcactggactcttggaaaccccagaggagcttggcaaagaaactcatcagctctgccccacaaagcagcgaatgcttcactcacatcccgccaagtggcttccctggcttcgtgtaataatctgtggaggtggctgcctctgtactgtaattgagctagagctaggtaatttaatcctcagtgcctgcggataattgtgaagtcttctatcgagcaacctttccctctcaggtatctctgaaattgcaaagggtgttttgtcctgaggcattcagagggactgtattcttgtggttatttactactgaagagaagatggtgtatccagacccacatgattgttctcctactgcaaggccctctggtacttcagaaaatacaaaagcctgttatgaaaaagttaatttttttttttttttgagacggagtgttgctcttatcgcccaggctggagtgcagtggcacgatctcgggtcactgaaacctccgcctcccggattcaggctattctcctgcctcagcctcatgagtagctgggattacagatgcccgccaccacacccagctaatttttgtacttttagtagaggcagggtttcaccatgttggccaggctggtctcgaactcctgaccttgtgatccgcccacctcggctttccaaagtgaaaaagttaattatttagcaaagcagtaaagacagtttggagcaaactaaaacacccataattctgcctcagggatgccttgcatttctgcaggtaggttcccagttcttgtttcgggcacacggagctgtacctggggttggagttgcagctgtgcctgttgctctcgggaggccatgtgccctcagggccgggagggcacactcggaagctcagctgcctgggctcaggttccagctgagtggccccagccccctcagtaccgtgtccttatcaagatagagtgacaggatcaacacccaaatcatgggcggccatgaagataactgtgatgtgcttagaacagcatcaggatcagagttaagagtcaataaataggccgggtgcagtggcgcacacctgtaatcccagcactttgggaggccaaggtgggcagatcacttgagggcaggagtttgagactagccaggccaacatagtgagactctgtctctataaaaaataaaaaaaattacctggatatggtggtgcgtacctgtattcccagctaattgggaggctgaggcaggaggattctttgagcccaggaggtcaaggctgcagtgagttatgattacaccactgcactccagcctgggtgacagggctagacccgtctcaaaaagaaaaagaaaaaaaaaagaaatccccagggcagtgagtgtcttctgtcccctctgggccctttccccttgtctgaagtcacccgcatggccagtggctttgcttttctgcctcctcttctgtcagctcttaccaccagttcctgacaaaccctcaaagcaaacttctggaatgctatgggcttgttaagaacacagcaggtccgaggagagtggcatttgatttgttttggaggccccatattccttctccactcttcttccctttccttttggacggcgtctcgctctgttggccaggctggaatgcactggtgtaatctcggctcactgcaacctccgcctcccaggttcaagtgattctactgcctctgccttcggagtagctgggattaaaggcacgcgccaccacacccagctaatttttgtatttttagtagaggtggggttttgccatgttggctaggctggtctcaaactcctgacttcaggtgatcctcctgcctcggcctcccaaagtggtgggattataggcgtgagccaccgtgcccagcccccaccctacttctctaataaaatgtgtctgtttattattctagttctgactagaataataatctatcaaaatagaagctagtaaaagtaacagtatattctggtaaaactgactgtatgccatgtatggtgctgaagcatttttatttatgttttctcattgaatcccccagcagccttctgaggtgtaggttatattattctcttttgtataagaaaatgaggcttaggagggtaagtacctgcccaaggcctcatggctagtagaacagatagttactgagcacctactgtgtgccagacatggtgtctagctatagtaagtggtgaatctgtgagagacccaggtgttcttactccaaaacctacactcttgccaattcttttttttttttttttttttgagatggagtctcgctctggctggagggcagtggcgtgatctcggctcagtgcaagctccgcctcccgggctcacgccattctcctgcctcagcctcccaagtagctgggactacaggcgcccgccaccacgcctggctaattttttgtaatttttagtagagacgggatttcactgtgttagccaggatggtctcaatctcctttccttgtgatctgcccgcctcggcgtctcaaagtgttgggattacaggcgtgagccaccgcgcctggccacgctcttgccaattctacattacctaaggagacacgtttcattgtcaccagccagggcaagcagcagtggactagtcatatgtaggcatccaggtctgagagccttaagcttatcattactatttttggaggcagggtctctgttgcccaggctggagtgcagtggtgcattcctggcttactgcagccttgaactcctgggcttaagcgatcctcctgcctcagcttcccaagtagctgggactgaaggtgcatgccaccccgcccggctgtgttttaatgcttattttgtagagatgggagtcttgctatgttgcctaggctggtcttgaactcctggtctcagataatcctcccgcctcagcctctcaaagtgcgggggttacgacatgacctactatgcctggccaaacaccaaattttaaaatgaagaaaaattttctttttaccagtttaatttaactattgtcatttttaaaaaacttaatttgcggcaacaatgtttcaataaaattttggattaaatagtcccatgggtcccaatctgggggaccaggaggtacaaatagaagatgcgggtgagagagaaacattgtgaaccagagtaatggaggctgacacagatgcagagcagttgggtctttctggaatagcacgtgtctctgcctttggctgcgatatttcagctctgttattggcaggctttaataacaagcagggtaaccatcataacacttaaaactgatagacaaatgtggttcatgagtgtggaatgagaggcattcttggtggtaagtaatgattacggggccgggcatggtggctcatgtctgtaatctcagcactgtgggaggctgaggtgggtagatcacctgaggtcaagagtttgagaccagcctggccaacatagtgaaacccatctctactaaacatacagaaaacaattagctgggtatggtggtgggtgcctgtaatcccagctactcaggaggctgaggcaggagaatcgcttggaggcaggcgaatcgcttgaacccaggaggcggaggttgcaatgagccgagatcgtgccactgcactccagcctgggcaacagagtgagactctatctcaaaataaacagattaataaagtaaataaaaattagctggtcatggtggcacatgtctgtggactcagcttcttgggagaatgaggcaggaggattgcttgagcccaggagttcgaggctgcattgagcagtgatcatgacactgtaccccagcctgggcaacagagcaagacctgcctcttaaacatttaaggtaatgattagtactcattagatggtaaagcagccgtcattatgcgagatgcctctctgaagttatcctgggctttacagcaacccagaaggtacaggcattactggtccattgtacagatgagaaagtcactgaggcagaggccaaatacagtgctcagagtcacacagccaaacttctggggctgcagcttccatatccagctgtatcctctttccctcttcctcctggttgacgtggctgggaagcagcagtgttttgtgttcgataggctaagctggcaacctgattcctgctggtggagctgctgccgcctctgcaatacgcttttgaaggaggacctgttgggcagtgggtcctcatggctagaccctgtgcagggggccatggtcctttggggggtatgagcactgccctgtctcgttctggctttgcttgtgtctctaggctaggctgcatgactgggaaggatgggtgctctccacacaggtcctgccgtgggtgtctgaggctgcagggcaccagctcagtctctgcagcaggcctcacagtgtcactgtttgggccaggcagaaagctagagagagacaggagaggcaggaacagatctggtcagctgatccagcacctgcagaaggctgcagcgggaccggctctgcggggtcagagcaggggcgggtgttgggtgggtgttttcatgttgctagggggaggtgccacgttgccaggtgtcccttgtaagctctgcagggtgcttttaggacatgggtgctgacttgtgctgtttgacagacatagactctgttcccacttgttcttatacttagaaaggatttttagctatccctccccagccctcatttatatgggaaggcttggctcagggagcgtaaggacattgtggtcatgctatgtgaaaatggcagaggaatggcgtttcgagtgttgacaggagtgcttttctttttgaagaaaaaagagagatttctttctttgtattttcttctgttcttttactgtttgctggatccctttttccattcaaacacaatttatggccggggcagtggcgcacgcctgtaatcccagcactttgggaggctgaggtgggaagatggctcgaatgcaggagttcaagaccagcctgggcaacatagcaagacccttcctctacaaataaaaacatttaaaaattggccaggtgcagtggcccatgcctataatcccagcactttgggaggctgaggcgggcggattactcttgaggtcaggagttcgagaccagcctggccaacacagcgaaaccccatctctactgacagtacaaaaattagctgggcatagtggtgggcacctgtggtcccaggtactagggggctgaggcagagaattgcttaaacctgggaggcagaggctacagtgagccaagatcataccactgcattacagcctaggaggcagagtgagactttgtctcaaaaagaaagaaagaaagagaggagagagagagagagagaaaagagagagagagagagaaaagagaaagagaaagaaagaaagaaagaaaaagtgtgtggtggtggcacctggcatctgcctgtagttccagctacttgggaggctgaggtgggaagattgttcgagcctaggaggtcgaggctttagtgaataatgattatgaccctgcactccagcctgggtgacagagcaagaccgtctcaaaaaataaaataaaaaaattaaaaaaacccaatagaaaaaaacctgcaactatttctgcccagtgtccatagtataatatgatcgccacactgctactcttggtttatatactgatgaacaagaagcaaaggtcctgccctcagaagctgtcagaactgtggggaagacaagcagcaagcattagaaaggcaaagcctatgccctgttttaaggcatgtttcaggaaagggcttctctcagatgtcagcggggctgaggtctcaggatggggggtttggcctgttttggtggcgggtggtaccgctggcattgcgctgccagaagtgagggggagagtgagttggaggatgctggagagggtggctcgtgtagattttatcccacgtacaatgggaagccagtggaggacttgaagcaggggcgataggatttactcacttcctcttgcgaagagcaggctctgaagcctgcttgccacgcagagcacactcagcagtgcgttccttccgtccttcactgctccttccctccgccctcccttgtacaggcagtgctgagggctcccctgtgtctcggggtagggagtcctgagttgacttagcggccatactctcaggctgctgacagtcctgtcactgccctaagcacggtgccctaacacccgtgagtcatagagctgtgctaggtgcagcaggagagacgcgtcccagcggggagttctggagccaggatgcggggtggggcggtgcgcgggccggtatcagagtcctggcttccagcctcagctccaccacttcctaactagatttctctttcttttttccttaaagactctctggtcccctgtcctcatttgtgaaatgaggacattctcaccggcgtctcaggggtgttctgaggtccaaacgtactagcttagtaaggcattagacttgagtgtggaaccgggcatcctttgtgattggagccttctcagctacctggaagcttttacggtggggagcggcggggctctagttcttccgggttaggactttgcgcaggaatgcagaggcagtgggagggaatgggggtaaatgttccgtgccgcctcacgcggttattgatggtaggtggtggcgttgctccagggaggccagttcctcttgaagtcacatctggagacccccttgggaccaatttttaagcccatttggtagctccccaagggttcaagtgccagctccaaaccctagtcccggggtttagggtttgaattctaggatgctgcctggtttcccatttccatcctggtttctctccagatggcctctgccagtcttcacatatcaaatccatccgtaagttcattcctatttctggggcaattctagattttccttcaaagagtgcctggaaggccaggtatggaggctcacacctgtaatcccagcactttgggaggctgaagcaggcagatcaatcacctgaggccaggagttcaagaccagcctggccaacatggtgaaaccctgtctctactaaaaatacaaaaattagccaggtgtggtggtgcatgcctgtaatcccagctactcgagaggctgaggcaggagaatcacttgaacccaggaagtggaggtcgcagtgagacaagatcacaccactgcactccagcgtgggcgacagagtgagacttcatctcaaaaaaaaaaaaaaaaaaaaaaaagaaagaaaaagaaaaaagagcgcctggaaaatagtaataatacaaatactttcttattcattttacctaccataaaccaggctttaccttcactaatgcttaatcttcatagcatccgtgtaaaataggagtgctagacttgttctgtagttgaagaaactgagaggctttgctgaaggtcatactgctattgggtggtggaggcagggttcacacccgctccccctccttgccgttcctggagacccacaagcttgtgtaatgccccaccttcagagaaaagcacccaggtctcaggatgtcccctttgctatagactgaatgtttgtgtgcccctaaaattcctaggttggaatcctaacccccagtgtgatggtgttaggaggtgggcgtttgggagttgattaggtcatgaggctggagccctcatgagtgggattagtgcccttaaaaaagggaccccagaggttgggtatcatggcttatgcctgcaatcccagcactttgggaggctgaggcaggaggattgcttgatcccagaactcgagaccagcctgagtagcacagatagaccctgtctctacacacacacaaaaattagacttggtggtgcgtgcctgttgtcccagctacttggaagtgagcccactttgaggtgagcccaggagtttgaggctgcggtgagccaagatcatgctactgcactccagcctgggcaacagagcaagatccttctcaaaaaaaaaaaaaaaaaagggaccccagagaccttgtttaccctttctgccatgtaatgatgacacagcaagaaggcgccatcagtgaaccaagaagaggaccctcaccagatcccgaatctgtcggtgccttgatcttggacttccagctgccagaactgtgagaaaatcagtccctgtcgttcacagtgcaccgggtccatggtgttttgttttcgcagccctactcggcggaggtgctcctgcaagaggccctctttccctggccgtccatctagaagagcgcagcacaggcaatctcatcccatccccccaagtgcagcacttccctggctgctgacttcaggtttcagagccccctgtaacctcactcccctctttagtttctttcctgtagcccccactgggatacaagctccctgagtagacacactttgtctgctagttaattgccattttcctcctcccccaaatcctgcctgacaagtagttgttcaagagacatttaaagaaggaaggaaggaaggaaggaacaaaggaactaatgtttattttagttctaacaagcatggagagttaaaagtgcattctgcaggaatgaattgaaaccgagttcccagagggcgggctccagtctgttataatcaccattgtgtctctatctcgggatgcagtaaaggcctggtaatatgagttgctcaagggagtggattttcaccttttttcctcttgtgtcagggagatgcagctggttgtagtggaatgatgcattacaaactatttgctctcagtgaatgggaacacttggttttgatcctggctctgagagtagtaggtcgcttgacctctctgtgcctcagtttcgcaagctatgaagtggaggaggcttccctcaaggattctttgtggtgctgaccatctgttctgggaaaggagccagaatatccacattctcatttgcggtgattaaagaaccactctgctgaagtttctcatgacttgcctgacctcgttagtttctttgataccaaagacaggtgtcttcctttcccccttgcctactgtctcctttacacatgtggtgacattcaggtgaatttgaatggcttttggctaggcaagccagtatcagtaaacacactggcttggacatttggcccataactttttatacccgaggccaggtgttggccgatgtgggaagagggctggaaagaggcagaatggtatttgtgtgagtgccagacccctgtggactgttttgctgagatgctgtcttatggagtttgtagaggtgaatcaacaactgtctttgtgaaaggcaaatgtcaccttcaggttttaattctgagtggccagcagcccttacattgccactgtatatcatcagagccactagaatattagatatgtaaatcctttctgcactttacacatcctttagttttgtagggccctgatgtcagtgatcacggcaagttgagaagcaatgtgttgggatggaaagaacatgggtcaggcagaccacagcactgctgttcaagagctgtgtggctacgtgcagtggttcctggctgtaatcccaacactttgggaggacaaggcaggaggattgcttgaggccaggagttcaaaaccagcctgggcaacatagtgagaccccctctctttacaaaagaagaagacagaaaagccagacatggtggcacgtgcctgtaatcccagctactcggaaggttgaggcaggaggatctcttgaacccaggagttgtaggctactgtgagccttgatcgcaccacagcctgggtgacagagtgagaccgtgtcttaaagagaaagatctatgtgaccccgggcaaatgctttaatttctctgaactcgttttcccagtccttgaaatggtggtaatattatccccttggtggattcctgggagttatatgaagtgtctgttgtatctgggaacctcattggaggctcatagatagttttagagatttcagatacctcttgcaattgtgtgcaaaatcgtgcttgtgtgtttgtgcacatacgtggattttcctggggagaagttcctttgctttcacgactctccttcagagtgttccaggctttagaaaaaagtaagaaacacgaaacacttcaggtagttagcaggtggtaattgcacatagtgtctggggcaacactggcaatcgtggtatcattatttttgtttttactgttctgcttgctgatgttaaaccagctacactggctgtgttcttacgcacatccctacatgtattagcagtgggaacctgggcaagttatttaagctaactgtgcctcagcgttctcgtctataaaatggggctatcatagtacccctctgacacagttgtgaggattaaatgaactaacagatggaagatactcagaagatacactatgtaaattaccacctgagctatcgaagggtgttatatgctatgtaaattataccttgataagaaaaattggaaaaaaaatccaagagagtatctggcatcttaaagactgaataactggtaggtgtgatcattaacaacaccctcaaagggtacgttgctgacgaatcttcctgaaaacaacatctgggccttattgttgaactgcaaataggttgacctgattttccatcttactgaaaccatccctcctgcagaggccctgaagttccctttagctggtatctacccctcaatcctccctctggttaagaggacataaaccaggctactctttctatgaggcctgaaaattggaagtgatcacgcaggatggtggttcttagctgggggtgattgcaacccccaggggacatttagccatgtctgggacatatatggttgtcacacctgggatgagggtccttccggcatctgctaagtagagcccagggatgctgctgaacgtcctgtggtggacaggacaggtcctcccaacaggacagctcctcccaacacagcattatctagtcccaaacgacagtacttgagaaaccccaagacagaaggaagcagcagggccgttttccaggaaccgtattttgtcttaggctttttttttaaaacctctcgcctcctgcataggtcaaggaatgaaacttaggaaaaaatgagcctaaagaaaatgatagatcccagggagcatttgtttgtgtgtgtgcgcatgcatgtgtgtgtgtatgtttgggagctttttcgtgccatcactcctgcaatgaagatgatgatttaggaaggcagtagatgcataatgatacagacctgtggaatgcaccagactaagtgatcctgactccgtagctgcggaagtaccgtcactgctgcggaaaccagctcactggtactactttactagatcttaatcaaaattcattcagttgatatttgttggtgtttacaacagccttgtctcccttcacctcctttttaacaacaaagtttctactcttgagttaatttcgtttgaatatatggttatttgggagctggaggttgcaagaaagcggctcaggctttattcctgccaatttcaggaagagccacattggagccaccagggggcgccctagtcttttctctgccgctttccttccgcagctgcgggtggtggttatctgaatttttcatgtccagcgcggtacccctttcagtggtgaggtcgcgagtggtggtggtgttgagagcagtggtcttttctagttgaaaaacatcaagcatgcatgcagctttctgttcaccatcagtatagcacagtcatgcattgccagtcactttgtggtcctgttctaaaagggaatttgcagctcatcagaaaacatttcccctgtgtcattgcttttcatgagatataattgattagctgtgggtattcagcttttgaatcccgattgttgccttcttgcccctttttttggggctggggagtgaaggtgatagagtcaggtgagcccagaccatccggcccatttgtttccttttaatttgttagagcttttgattgtgagccagggcagagagggcaagaaaaacatccttacttgtcaataggctgtgttgagggggtccttttttttcctcttggctattattggaagagattctcaacgctagtgaggcgttctggctcatcgcctagcaacacaattccaaacattcggcagctccagaaatgaagttgaggagtgctgtagtaacatcagagagagatgcgaggccccgcagccagctgcttgcttggctaagggcttcatgataaaattttaggatgagatggtggggcagtggccgttaaatcggctgcagtctgagccccctgccccttaactgccgagaagtgaacctaggtgacgtggccaacacagatccctcacgctgggcatctttctttaaaggggaaacttcccactgaattttgtgtattagcccttcagtgactgtcttagtgtcttagtaattggaaggttccagatggcatttagacatgcctcacttctttatcatctgtttattcattcaccaaacatttaccaaacatctctcatgtgctgggcgcagttctaggtgctgaggagccagaggtggggatccagcttggccatgcacaagctctgtgtcacatgttaaaatttccccatcattataatgcagatttaagagtgccagcaccatgggctgttgtgaggactaaatgagttcatacacagagagtgctttgacattgcgctcagcactcaggagatgttagctcttctcacatgggccctgcccacagagcattctagtggagttttatggtaataaagaaatgatgaatgattggatggggcaaaacgggaggcaatggggtcatgtgggagtgatgtactctttgttatctgtggcactgaacaaccgccactcgatccacccatgggaacgagttccccgtgaagtgggaaattcctaatggaagttttaggttatgcagtacagctcccaactccttacctggaaaaagaccagtgctggatgctggtcactcatatagaccctggattccttgctcccaggaggggaaggaggaaccgatgacagcaggatgaatgtagcaaggatagggtggctgaggtccagagggtcacaggagggaaaggttaagggctcggtgcaggggaggtcaggaggtcttgcacagatggggatgctgggccagaagggaacctccctgcagtgtgcaaagggggctgacagtgatcttccaggctgcacctctggttccgtcactaagcactgcaggatgtcgggatgggcttgaggagctgttgtcgccattatgaagcccttgaggaagcattggtgatggtgctgccgagtactgagtctgtccttgtcacccgttaactcacgcatgtctgcgatcctgtgagagcttgcggtgatccccatttcacagaggagacgggagtgcttagcggtagataaacctagccagcatcacacagccagtggccggtggagctgggttgcacagctaggctcttactccgggaagaatatgttttagcttcacctggagaccctgcaccaagccagagggcattttgaaggggctgtatttcaggccgacttcccgcatctggctggttgttccctgcctcaccaggctctcacttgtctgtggttaatgatccaggctgcagtgagtacacaaggtctcagtatcatttctgtgctcttggtttgggccacacatgatttttttttttggtcttttttagcatttgttcattttatttgaggtctgctgcattcctcctgacctccctaacagctcagactcttaatttgtttacagactttcaggaagggctgtccctgaactctaagctaggatcaacttttggtctggaggtttctagccggctatctcagctgggccaggcagcagcttatgtaaccgtttgatgcaattcagagccaatccaaaatgggcctctcgctcaggggatgagacgcggtcagacttgtttgaaatgtcagctttgtttgagctgggacagctcagtttgtaaagttggaaggcgggggtggtggggaggcagctgggtgtgagtttattgggaaggagtagcctgactgggctgcttcattaaagttgggggagctgcaccgccctggaggagagcaccccaggctcctgcagtcccacatgaagggctcacgtcctggctttgccatttactttgtccgtttccttatttccaaaaggaggtgaatagcacttgccatgtgcagtgcccgcacacgctgggcccagaggacgctcagtacgtggccggggtgcttacgttttggttgcagcccagcagttctaacccttcccctgccccctccttcaactccttttcctcctcctcttctccctcctgccctagaccttaaatattaatgttaaaaatttgtatttaaatttttgttttgcataagtatatatttacatggaacaaaactcaaaaggtacgtatgggataccgtaaaggatttctcttccactcccacatcagccaccttgctccccgtccaggactctaaccattggagttcaccttctggaagaacgtcgctgcccagttgaatagggggttgggcatactggagctcccacttgcagtggccaccgcgtgccctttgatgggacgttacattgcatttcagcagcacccagctgcttccaggtgtctgtacacaccgtcggtttcatgtgcgcagacgattcagtttcatgcgcgcccgattcagtttcatgctcttccgtctgccgggacaccctcccctctcctcctcttttgcctgggtcgtgcttattcatcctgtaagacacagcttaggcgtcacctcctccagacagacagacacgtgaagatcaagaggctagctttgtcatcagtaaagctggttggaaaacagagctttgaacctgtgggaaggtgggcttacaaaacctcgtccctgagtctaacagtcagaggtagagacccccctcagggcagttcctgagcacaccttgtggggaggtgaacaggtgggtgggctctgagagaacccacaggagctgagctgaggaagagcgcctcctgtctggcccaagtgggccaggtcactccctgcattgtgggagcagagagtacgggacagaaagagtgagggtgggaactggggagtggggacctacttcatgtgaaaatgggaggtcagagaactggtggctcccctccagcacagagcacttcatgaggaaagagacacttaggtttcaggctgttgttagatacatggctgtggctggtgactttgctgaggttctgttttctcttctgcagaatgggactaattacctgtctttcacatgtttgctgtgaacattggctaaaataaagtaggtagagagtggtgtctgagtctgcgaggtggtcagctcagcactaaacccagggcccttggttccgttttcttgtactgcccttctccctgattcttctcgaacctcccatctcctcttccactgaaggaaggaagaggcaccgtgatttttgaatggggttgtgtagctcgtaggggagttgggtatgtgtgaggaagggccagtgagttggtgctgcattgttcctgggtagttaggtgacagctggcagctcagtatttagtgacctaaacagggaggctccagggacaggagcagatgcagcctgtctgagggcggctctgcccttggctcttgggtcccccacagcgttctggcccggactcccggtgagggtggagtcctgtcggcctccagaaggaagcccagttctgaccatgccctctacccttttgtattcagactcccaccagcatctgggaggacttgcaccagcctgctgtgcccttttgattcgtggagtgtggatccctgggctgagggacggagcagaatgcctattgtgcctatgttcctggggtgctagcccacctccctctgtggtgcagtgccctcatgactgcctggctctgagatggaaggaccctaaatgcaaatccatctctggagtggcactctcctgtgagcgctaggcatgatgaacccgggatgatggtacttgatcagtgtgcaggcactgtgctcagtactggacatggatttcccctgtctagtccttgcagcgaccccatgcagcggctactgttatcgcctctctctcattgagcagaatcaaggctcagcgatggaggaacttgtccagcatagggagtccttggtgggagagcatgggacttcaaagcccacctcttaaactgtgagcccaataccttctggcttttcatccttcagtcattcattcaccaaatgtttacaaaggcctgctgtgtgtcaggtgctgtgctggctctaggcagggtgtctccactgcggcactgtcgacctttggattggatcatccttggctgtcctgtgcattgtaggaaattttgcggtgtctctggcctctacgcactagttgctggtagcaccaccaccagttgtgacaggcaagtgtctgtggacagtgcccagcgtcctccaggggagcggggtaggtaaaactgcccttggttgaaacccgctgctctaggaatccataagcagaagagacatgtcaggtggggctctgtcctctacggtaaagtaaagatggacaagaggaaggacggtgcatgctggaggggctgctgtgtccagatcgggctgtctgcagaggcctgtctgacaaggtgacttttgagtaggggcctgaataaagtgaggaagagatcatggggatgtggaaggaagagtgtgcttggcagagggaacggccaggacagaggccctgggtgggggtgctgggtgtggctggggcaggaggagatgaggcagagaagttggggatggggtgggtggggtggcctcagctttcaccctgagtgagtaggggtgctgctgggggcattagagcagaggtggtgagacaggtcatctggcccctgggtggactgggggacagcagggagggcagctggcaggtgggggtcacaatgtaggcagcagatgctggccacctgggggagggctggggactttttgattaggaggatgacctttgggttttctccacattgaaacgatcagtgcaacacctgcccacggtgaaaacacccatccatggcccatctcttctcaattcccaggacgaagagtgccacgaagagtgcctctccagtctttcagctgttacttcattggagggacactcttcttctaccaccatttcttgaattggcacgttttagacattaccagtttcctgctggaataggtagaggttgtgcgtgcgcatcctgagcatcctgctgggctgaagggagcagcctattttgttctctcctttctcagggctctgcattattttcttcttcatctgggtgtcctaatgtacctttgtggccccccccaactttttttttttttttgccttgcagaacctttagcatctctctcattctgttcttcctcctactaaatggttgacccccaattttatttttttttttttttgagacagagactcgctctgttgcccaggctggagtacagtggcgtgatcttggctcactgcaacctccacctcccgggttcaagcgattttcctgcctcagcctcctgggtagctgggattacaggcatgcaccaccatgcctggccaatttttgtatttttactagagacagagtttcaccatgttggccaggctgatcttgaactcctgacctcaagtgatctgcctgccttggcttcccaaagtgctgggattgctggcacgagtcgctgtgcctggcctgacccccagttttaatcatcttatgttggcagctgtagttttagtcatagctgtctcttggtaataatgaaaaaggaaagtatctttttaatttaaatatactttaagttctgggatccatgtgcagaatgtgcatgcttattacataggtatacttgtgccacggttttttgctgcacccatcagcccgtcatctacattaggtatttctcctaatgttctccctcccctagccccctaccctcagacaggccccagtgtgtgatgttcccctccctgtgtccatgtgttctcattgttcaactcccacctatgagtgagaacatgcggtgtttggtcttttgtccttgtgataatttgctgagaatgatggtttccagcttcatccatgtccctgcaaagaacacgaactcatccttttttatggctgcatagtattccatggtgtatatgtgccgcattttctttatccagtctatcattgatgggcatttgggttggttctaagtctttgctattgtgaatagtgccgcagtaaacatccgtgtgcatgtgtctttatagtagcatgatttataaacctttgggtatatacccagtaatgggattgctgggtcaaatgatatttctggttctagatccttgaggaattgccacactgtcttccacaatggttgaactaatttacactgccactaacagtgtaaaagcatttctattactccacatcctctccagtgtctgttgtttcctgactttttaatgatcgccattctaactggcgtgagatggtatctcattgtggttttgatttgcatttctctaatggccagtgatgatgagctttttttcatatgtttgttggccacataaatgtcttctttggagaagtgtctgctcatatccttcacccactttttgatggggttgtcaaaagctggaagcattccctttgaaaaccggcacaagacaaggatgccctctctcgccactcctattcaacatagtattgcaaattctggccagagcaatcaggcaagaaaaagaaataaagggtattcagataggaagagtagaagtcaaattgtctctgtttgcagatgacatgattgtatatttagaaaaccccattgtctcagcccaagatctccttaagctgataagcaacttcagtaaagtctctggatataaaatcaatgtgcaaaaatcacaagcattcctatacactaataatagagagccaaatcacgagtgaactcccattcataattgctacaaagaaaataacatacctaggaataaaacttacaagggatgtgaaggacctcttcaaggagaactacaaaccactgctcaaggaaataagagaggatacaaacaaatggaaaaacattccatgctcatgcataggtagaatcaatattgtgaaaatggccatactgcctaaagtaatttatagattcaatgctattcccatcaagctaccatgcactttcttcacagaattagaaaaaaactgctttaaatttcatatggaaccaaaaaagagcccatatagccaagctaatcctaagcaaaaagaacaaagctggaggcttcatgttacctgacttcaaactgtattacaaggctacagtaaccaaagcagcatggtactggtaccagaacagatatatagaccagtggaacagaacagaggcctcagaaataatgccacaaatgatctttgacaaacctgacaaaataagcaatggggaaaggattccctatttaataaatggtgctgggaaaactggctagccatattcagaaaactgaaactggaccccttccttacaccttatacaaaaattaactcaagatggattaaagacttaaatgtaagatctaaaaccataacaattctggaagaaaacctaggtaataccattcaggacataggcatgggcaaagacttcatgactaaaacaccaaaagaaatggcaacaaaaaccaaaattgacaaatgggatctaattaaactacagagcttctgcacagcaaaagaaactatcatcagagtgaacaggcaacccacagaatgggagaaaatttttgcaatctatccatctgacaaagggctaatatccagactctacaaggaacttaaacaactttgcgagagaaaaacaaggaaagtgtattcttaatgtttccttgtctccatgatcatccttctgtgatgtttttgtaatcatcaatttattcttcattcctagagtcctaattatgtgattagaacctttctagaattcgctgctaaaaaagatgaactacacttgcaaaaatgacctatactcgattcagtttcctggaattggaagcctgcattccagatgaggcagcagaaaaagtcagagtttgtttccttgaaacggtggctaccacttgatcccataccatctggcagttgtgtgtgttgtttgaaaatcaaggcatagtttgatgcttgtgggtactgagctgccaggagaatcttctcaagaaaaatcaggcacagagatcacccaggctatggttctttgaggtcagcgcttttaaaaaacttgtgtccaggtgtggtggctcatgcctgtaatcccagcactttgggaggccgagatgggcagatcacctgaggtcaggagttcgagaccagcctggccaacttggtgaaaccccatctctactaaaaatacaaaaattagctgggcgtggtggtgcatgcctgtaatcccagctatacaggaggctgaggcaggagaatctcttgaacccgggaggcagaggttgcagtgagctgagattgcaccactgcactccagcctgggtgacagagcgagactccatctcaaacaaacaaacaaataaacaaaaaaaaaaaacccaaaccaagaaacttgttgccactttttctttgaccttcaggttctccagatctccaggatcattcccaggattagctgtgggttggggccattattttcataaagtgtagttggaagtttccttaaatagtgggtgtacctgtcactgtgaatactggaaacctcttgttatgtttatccatgcaaatctttgttaaaaatagttggcaacccttgtctttattgttgtgcattgtatgcagaactttctttgctttccagacataagatccaaaagacaaattgtactgaagaaagcgaactggaaagaatgtcaaagacttgccttctagggctgggtctgaatgtctgctgggaatggcggtgtgatttgaagagttggctccaaatgcagatccactcgggttttattaatgcttccttctgcagggtccctgctcatccacataggaaggagattgaggcttactttggaattccagggaagtcagcctcagtcttcagagcatgaggcaacaccgtgagcagtttcttaatggtgagggtcacagttaacccaaaaatgaggccagactgtgctgagagtctaatttatttccttccttcctcccttcctccctccctccctccctccctcccttccttccttccttccttcattgtctcactctgtcgctaggctggagtgcagggtcatgatctcagctcactgcaacctctgcctcctgggttcaagcgattcttgtgcctcagccacccgagtagctgggattacaggcacacaccaccacacctagctagttttttgtttttttcttttaatagaggtgggtttttaccatgttggccaggtaaaaacctgaccttgtgatctgcctatttcagcctcccaaagtgctgggattacaggcgtgagccaccacacccggccaggaatctaatttctaaagtgcattttgggaaaaaaaaaatccacccacaaatctttattaaagagtgacccttattagtctatatgtgattttcttcttttctaagtagcactggtgactcaggtgatgcattttagtgatggaaaaactcaaaacacagagacaatgctgtgtttccagggtctcctagcccttctctcctcctgccccagaagccttcaggcccagcagtgcggtgtgtggtcctgctgcacaggtgagccacagtccttggagtggagagattagcttggaaagaagagatctgcaaagctctttttgggcgaatattaagtttggtgaatgagtggagaagttgggtgggggactgcgaccatatttaccagcgagctcagcggtgggcgtcctggctggcccagcatgagaggagatgaagagtgattgcttcctggaggagtctgtactaatccatcttcataagcctcagccgtggctcctctggagggacagagccaacgtttccatctaagtaacgcgagggaggagggagagatgctgaagcaagattgtcacagcttaatgatacgaaatgctctcaccggggactctagaaacttggcttctgtgagtttcatctgctcacccctgccctgtgtgggctgagggagggactgaaaagctcccctcctaatgtgtcaatggctttgccaggaattgcatcggtggtgtgtcaggcgggctgttgtctggtttctgtgacagagaccctgagcaacactggtttagacaaggtagaattttctttcttcccacttgacagtttgaagcccagtccactcttcttggtggtgccattacatttcagatgttgcccttgtccacgtgtccatcacatgcacatttctgccagagcggagataaggccccctcctcggccccctccttttctgctgctgcttgtttttctttttcagacagggccttgcagtcacccaggctgcagcgcagtggaatgatgataccttatggcagcatccacttcccggtctcaattgatcctcctgcctcagcctcctgagtagctgggactacaggcacgtgccaccatgcctggctcatttttctattttttttttttggtagagacagggtctcactgtgttgcctaggcttatctatgactcctgggcttaagcgattctcctgccttggcctctgaaagtgctgggagtacacgtgtgagccaccatgcctcgccccttttatttaagggtatacccccaacttccagtagtgcttccttttttttttgagaccgggtctcactctgtcacccaggctgcagtgcagtggcacgattatggctccctgctgccttgtactcctggactcaagcagtcttcccactttagcctcccaagtagctgggactacaggtgcatgtcaccatgcccagctaattttgaaattttttttgtagagatgaggtctcactgtgttgcccaggctggtcttgaactcctgggctaaagcaatcctccctcctcggcgtcccagagtgctgggattccaggtgcgggccacggcacatggccctgcatcacttcctattaacctcaccttggctggaattagttaaacggccacagctgcaaggctgcacgtgaaggcgagagatgtctttattctgagtggtcacctggccagccaaggcgcttcagttactacagaagaagaaaatgggtgtggggacagctggcatctgctccaggtggaagacagcacgggccaatctgactgaccacagcactgtgggttttttttttttttttttaaaacgtttttgcttcgaaagaatttaagacctggtgcggtggctgatgcttgtaatcccagcactgtaggaggttgaggcaggaggatcacctgaggtcaggagttcaagaccagcctggccaacatgccgaaaccccgtctctactgaaaaatacaaaaattagccaggcatggtgactgaggcaggagaatctcttgaacctgggagacagaggttgcagtgagctgagatgcgttccttcattccggcctgggcaacagagtgagactctgcctcaaaaaacaaaaacaaaaacaaaaaaaagaggagttgctggttatgtggatagaagagaatcgaggtgacgagtgggtggtgggcaccgtggatgtgatgactgcctgccctgtccaggcatctgcttgttctggagtttcattctcagacatcctccccaggcccagaagcaggtgttctgctacccgtccataggaattcttcattaggaatgaagaaactgtgtgccacagggattgattaacaatcgtgttttaagtgatagaattaggtactgttgaagctatgaaatgaattaggctgtgagcttttttttttaaggccaaagattgattgacggtagtggaatgagacttcgaaatttattaggagttgctagaaaaataaggaggggaaaggtccatgttgaaccatagagattttccatttgacatcaattgctctttgctgttccaaggaggataattatgctacccgagctgagatgcagatgggccaggctctttttggacaatctttagggtaggagaagccctcccagtggtagaggaagttgacttttactagccttgtctggcattctttgatgagctatggtagaggttaggaagggccaggactgaggtgggggagaatgccacctggctcttgaggctgggaccccaggcctgatgccctccttatggaagttccatgccaggccagggggagactccatgatggtgagtggcttccatgagaaaaagacaactgggctggacttgaccatgggagaaccaagtcagcaggtgcaccagaaggtgtcacggcacctggaggctggttctggctccagacttgaaccttttgagtcttggaggtgctgtgttttctcttttaggagaggggtcagaggcatccaagcttgttgggtgactactatatctgggcagtgtgcatgcgggaacctccatagcctgtagctctcttaatacctacaacagccctgtgagttgagtgatcatgtccctgtgccccgatgccacagctggccatcagggaggttcagtccattacgtagagttatgctggtggtggccagtgcaagggtttgaacccagcctgagccctgaagcctctgctccatccatacacacgaagctgtccctgtcttgttcgttttctgttgcttataacagagtacttgaagttgggtaattaataaagaaaaggaggctgggcacagtggctcacgcctgtaatcccagcactttgggaggccgaggcaggtggatcacacggcaggagttcaagagcagcctggccaagatggtaaaatcccgtctctactaaaaatacaaaaattagctgggtgctgtgacaggctcctgtaaccccagctacttgggaggctaaggcaggataatcacttgaacctggggagcagaggttgcagtgatcccagatcatgccattgcactccagcctgggcaatagagtgaggcgctgtctcaaaaaaaaaaaaaaaaaaaaaaaaaaaagaaaaggaatttatttcttagagttgtgcaggctgagaagtctagagttgagagtttgtatctggtgaggaccttcttgctggtggggactctctgcagggtcctgaactggcatagagcagcagatggggaggggactgagtgtgtgagctcaggtctctcttcctcttcttaaaaagccaccactccaaaaatgggcccactcccgtggtaccccatgcatccattaactcattcatccatgagtgcatgaatggttcaatacactcatgattgccaagctctcatgacacagtcacctcttaaaggccccacgtctcagtactgctactggggcttaaatttcactgtgagttttcgaggggacaaacattgaaaccacagcagccccctgtcagtggcctcactacagcactagtcctaattgtctacatccgggaccctcatgcatgcaccacgaagctgctgtcatctggagcaaggagggacatggtgagtaggggatgcccagccgtgcagactctggaaagctcctgcaagaaggctcaagggttaacctgttgagcttccattgccctcatctttttttttttgacacggaatcccgctctgtcacccaggctggagtgcagtggcgcaatcttggctcactgcaacctccgcctcacaggttcaagcagttctcctgcctcagcctcccaagtatctgggattacaggtgtgcactaccacgcccacctaatttttgtatttttagtagagacagagtttcaccacgttggccaggctggtcttgaactcctgccctcgtgatccacccgccttggcctctcagagtgctgggattataagtgtgagccaccgtgcccggccctcgtctttaaaatgagtgtgatctcactgtcctgccgtctgcactgggcaaagtgaatacggaggctccgaccctaagctggacctgtcactggatgctgagcttgcggggaggtgtttcagaactgcagctcacgtgtctaaagctgcaaatggctctcagatgactctcttcctgcatccctgcttggagatactttcccctgaagctcctgaggcaggagagaggtggaagcatcctttatttcctggggtgaggcagcccttcctcccatgtgtctaacgtctcctgcagcccagcatgtcgttccccacttagtctgattaaagactaattttctagctctgaaggtggaacttagaacagactttttccttttctccaggtgagtgggttttgcacagatgactcagaccatagactgtgatgaacacagaagcaagagtccagcttttagggccaccttttggcctgctgagccctgtgacgaggaagggacggccttttgctagggaagagcaggtgtggtggctgggctgcttgactccctttggtttctgaaggcttagtggttgggcttgcggtgagacaaacgcccaggcttttaaaaacaccctgctccagggtggtcaatgtcacttcacacaatgccttggtatctaaaccaacctctggactacagcagttgtatcatccagttttctgttgacagtctgtggacctgagcccttttaagacagtgtggtggcctgaggaaacaaacctgattattaacaaaaaatggtgtttttcttttttaattttttttttttgagaaagggtcttgctctgttgcccaggctggagtgcagtggtgcgatcatagcccactgtagcctcaaactcctgggctcaagcgaccctcctggctcagagtagctgagatcacaggtgcacgctaccacgcctggctaatttcttattttttgtaaagatagggtctgtagtgagctatgttgcctcaaactcctagcctcaagtgatcctcccaccttggcttctcaaagtactgcgattacacgtgtgggccagaaagcagtgtttttctgagggggccaaggtcttaatacaatggcatgttcacaagggctactgaggcgatctgctgcatgcccctgcaccccagcaggatggtggtttatcttgacaggtgcatgcacacacctgtacccttccacccctgcaccagtcagctcacttccctgcccagcaccctgctgtggcctcgttctgcactttagcacaaaatccatgtttttgctgtggcctgcaaagcctgcgtgatgtgacccctgctgccctttgccttccatgacctgtgcttgtcacttgccagccacactggcctttgagccgttcctcagacttgccaagttccttcttacctcagagacttgaggcaggctcctccttccctccctgcgcaggagtccacttagcagacttccctttacgtctcagtgacacagtggggaggttcccggccccttcccactgcaaggaaagcaagtgcctgcttccagcctccaagatggcaggcagcaaggagaatgggttgggaatggctttgggcatagccacccagcagagcttgtttagttgagtgtgatggagagatcacctagactgaatggtgtgggtagcaggtggcaggaggcatgagagtcatttcagatggtttaggaaagcctgagtgagagcgagagatcttcaggaggctgctggggtaaagcaaaatcatgggagtacggagaggtgagatttgagagtgtgtgtgggttgcttccccagatccgtgtcgcctgcttctctgaagatctgagatggggtgtgtggtggggggtctaggaagcactcactgcatagcagtgaaatgcacagtcttcattccggagcagggcgtccgcagacacacccaccccgtggtcatcgttcccagggctctgctggcagaggatgcacacagaggttgtgcgcagaggttgcagtggtttgcaaaggtccaaagctatgtgactgctgaactctgggagctcttggagtttactgctgggtgaagctgggtcaactgcccaactgtaccttcacctcccttcgtagaagacagggtcggggtggaggaaggggagctgccagctgccagtctgtcctgagagtgcccagtcacgagccacaggtgcttccttaagtttggagctctgttctggaagcagcagtgtgctcctgcccctacctcccctccctcttaagtttgaatcagaacaaaggcagttcttggtgaggaggcaactcagaaacagggggcagggcagacttcgggcacctccagtgtcatctctgcgtggctgctgaggtggagatctggggctgatttagtcccatccacgtgtattcatgaaggtgctgccatcaggcaatgtactaggctgcatgcgtgagggaaacgcagaaggcatgggtggaatcctgctcacaagggactcgccatttagctggggaggctgtgaagtgaatgccgaagacgacagcagccccaagcgggagaagtggctttgtctcgtgaggtccaggtctcttctggcaagacagcttgtctgagctgggttttcagtgtgagtttcgagtgaaagggtgctaaatccttgaatgtcaaaacccactgattgttcagtttccagttatatttttgctccaacatcactggtcctcaatagcctactgtccttagcttagaagtgcaggtacctgcactgggtacagctggatgtataattgccattctcttcctgccggaggaggatggaatggagaatatttcccctgtattccacatgttaagagatcacctctgcactggattcattggagcacctggaaggaggcctgatggaaaccacgctgcctgggacagcgtggtggactctgagtctcaggagatccacatgattcccattgtgtttgtccagttatgctctgagtgtctcttgttgctccgcatttctgggccttgcttgccttgactccaagactgggcagcatcctctgcttcccttccctgctctccaggactgaggaagtggattgagcagtcactccttaggcaggcattagcacggcatctttcattttgcagatgcctaatctcttttccccattgaatcacctccataatttgggaggttgtcaggaggtgccgtcatgcccatttcagaggtggggaaactgagcctcagagcagacaagccacacatccatggctgcaagggaggtagagtcgccgagccgggctggaacctggcccctcctgactacatggctcctgtgttctgtctaaggatgttctggttatttctcaaagtgtcaggtgcagagtaggatggtgcagagttggtgagattcactccgggtgtgagatctgcctgcaccctctcagtggctggctgcatctaattaattgcagattatgtgtgagagtctgtttgagaattgcccgtgcatatgataccacagcctgaaggggaaggaagctgtgcagctccgcatcctcattatttatgagtatttcgcatgcaattaatcttccttgccaccagttaaccccaccactccactgtgcatgaggccagtgacaacagatgttggcctcgcagccccaggggccatggcagactcagggctttagacgggtcggggtcatatctctgctggttgcatttggccggcgagcggccagcggacaggaacagatgacgaggacagctaatgtgccacattcacttgcaggagccagaaactggtagggctcatctgctattcctgatgaatcacagcatctgagagctagaaggattctagaagatgagcttgtgtaacctccgcattttgtagatgtaacatctgagacccaaagtgggtttgaaatgccatgccagttagaggctgggcccacagtccttgtctgttacttgccgtgacatcacatgtctttgcttataatgtcatttttctcatcctgtatatctcccaccttgctggccacgttgcctcccgtgccaactcagtgtaggttccacatagcatatgagctgtgactcatttggttacaagggacagaaaccagctcaagccagcttaagtaaaataagggaataatatcgttcccctaactccagcatccagaggtacagctgcaagtaggcgtccctggatcccagggttggatggttttcaggtctacccctgaagggctctgttaggaggagagaggtgcagagaagcacacgtccatgacctgtggccatgctggctttgccccaatcctgttgaggctctgtctctaaaatgacatgatggtcttgagaatgttgatttgtgcagaaccaacatgaagccctggcctcctcattctgagatcccattcgggagacagtgagtatcactgtggttatgggttccagtgtcagatggcccgtgtttcagtcccggttctgtatcgtcattcctttttttttttttaattttgtttttgttcttcttgagacggagttttgctctgctgcctaggctggagtgcagtggcatgatctcagctcactgcaacctccgcctcctgggttcaagcgattctcctgcctcagcctcccgagtagctgggattacaggtgccccccaccatgcctggctaatttttttgtatttttagtagagacggggtttcagcatgttggccaggctggtctcaaatgcatcataattcctttgtaatttagggcaaatcacttcatatgtctcagtttcctaatctataaaatgggtttgattctaaacacctgcttcgtggcgtgatttggagggtcgaatgagataattgacacatagtttcaccctgtgcctggcactcggctggtgccctgctagcagttgctattaggaacacttaacttctctcggtctttccatctgtgaaatgggggatgacaccaccagttccatcaaataagggactcgctggttcctttagtacagtcaagcccagacctagccttcaaggttggcagtggatgaaaaattgcccctggcagaagctgaagtccgtccctccccctccgttgctttttccttcagcccccctcgctgctttcactgctgctggtgttgtcttcttcttggctgggaatcccatcctatctgtggtagggactggattctcctccacaagtaccgaaggaagaaagtgggtttctcagtctccctagggtttatagactcatgcagctttgagagccaggccagtgaaaccccaggcagggatgggacacagcagggtcagacatgctctgaccagagaaattcaggggagtttttgctgcctctactgtatagcccaggccttgcccctgggttgctccaccttgatttgtgtgtgtgtgtgtgtgtgtgtgtgtgtgtgtgtgtggtgctgggtactaagtggaatcactctgtaaaggcacatagaacagcctgttattcacaagagctcatgtgaatatctttgcagaatgtgccatctcttcttgcagacctactgattttgtgttttgcagtgaagaatgggtaggctccactatgcacggtttcacatttatctggagccatctaattaacacctgtactccacttgtcacctgaacctggtcctttggcgggtttctgcaatatgttcctcctcgaggcctttctttgtgaaacacatgtgtacctcgcttgcagctctctgcccactgacggagaagtgagtgagcctcttgtgtaattgatggataagccctccactgcaccccgcaagaggagtattcttaggggagcagctgtcttcctttccaccctcgtcccactctccctaactgctttttcaactggatcagtaaggatttagtgttaaacaatatttggattcattgtggtgaaataatccaaattgaccgtgccaggtgatggagacaaagatatctgccatactaatttccaaactctcctgtaagtgcaatatagtgattttgaaaaactctctctcctaattgtgggaaacagtttggtggatccttaaaacgttagtggaattaccgcatgtccctgtaattccacttctaggtacacatccaaaagaactgaaagtagagactcaaacaggtaactatgcacaaaggttgatggcaacatgatcacaatctccaaaaggtggaaacagctcagtataaatgtccattatctgaagaatggattaacaaattgtggcatatccatacagtggaacatgattcagctataaaaggaatgaggggccgggcgcagtggctcatgcctgtgatcttaccactttgggaggccaaggcggggtggatcacttgaggtcaggagtttgagaccagcctggccaacatggtgaacgtcatctctacttaaaaaatacaaaaattagccgggtgtggtggcgggcacttgtggccccaggtacttgggaggctgaggcatgagaatcacttgaacccgggaggcagaggttgcagtgagccaggatcacgccaccatactccagcctgggccacggagtgagactccttctcaaaaaaagaaggaatgaggcactgatacatgcttcaacgtggatgaactgtggaaacaggcttagtcaatacatgcttcaacacagatgaaccgtggaaacaggcttagtcaatacctgcttcaacgcggacgaaccgtggaaacaggcttagtcaatacgtgcttcaacgaggacgaaccatggaaacaggcttagtcaatacctgcttcaacgcggacgaaccgtggaaacaggcacggtcaatacgtgcttcaacgaggacgaaccatggaaacaggagtggtcaatacgtgcttcaatgcggatgaaccatggaaacaggcgtggtcaatacgtgcttcagtgcggacgaaccatggaaacaggcgtgttcaatacgtgcttcaatgcggacgaaccatggaaacaggcgtggtcaatacgtgcttcagtgcggacgaaccatggaaacaggcgtggtcaatacgtgcttcagtgcggacgaaccatggaaacaggcacggtcaatacgtgcttcaacgcggatgaaccgtggaaacaggcatggtcaatacgtgcttcaatgcggacgaaccgtggaaacaggcgtggtcaatacgtgcttcaacgcggacgaaccgtggaaacaggcgtggtcaatacgtgcttcaatgcggacgaaccgtggaaacaggcgtggtcaatacgtgcttcagtgcggacgaaccgtggaaacaggcgtggtcaatacgtgcttcaatgcggacgaaccgtggaaacaggcgtggtcaatacgtgcttcaacgcggacgaaccgtggaaacaggcttagtcaaaggagccaggcaaaaagactctattaaaaaagaagaccacataagagatgattccgtttctgtgaagcattggagtacgtaaattcatagagacgcaatgtggatcagaggttgccagggaggaggatgaaatgggaagaaattgcttaatgggtaagaggttttgctttggcgtggtagaaacgttctagaactggatagtagtgatggttgcacaacattttgaacgtactaaaggccactgaattgttcactttcaaatggttaattttatgtgatatgaatcgtacctcagtacatgatttttaaaaaaccttcagtttggcggggcacggtggctcacagctgtaatcccagcactttgagaggctgaggcgggcggatcacaaggtcaggagattgagaccaccctggctaacacagtgaaaccctgtccctactaaaaatacaaaaaaacttagccgggtgtggtggcatgtgcctgtagtcctagctccttgggaggctgaggcaggaggattgcttcaacacgggaggcggaggttgcagtgagccgagatcccaccactgtacttcagcctgggcgacagagcgagactctgtctcaaaaataaaaacaaagaaaaaaaactttcagctgtgccaccgctccccacccgcttctcactagccaagtaagcctttcgcttagttccattgcttctactgctggaagcaacctctgcaactttgtgcttttaattctggtgagtactcctttaaagctaaagtgctcatgatgccttttaaaagaagactgtagatagtagatatacagaccacctttttttttttttttttttttttatgagatggagtcttgctctgtcacccaggctggagtgcagtggcaccatgtcggctcactgcaacctccgtctcctgggttcaagtcatcccctgcctcagcctcccgagtagctgggattacaggtgcctgccaccatgcccggctgatttttgtgtttttagtagagatgggatttcactgtgttggcctggtatcaaattcctgacctgacgtgatccgcccacctcggcctcccaaagtgttggtatgacaggtgtgagccaccgtgcccgccctagagaccaccttttgatgccttgatatgaaatgagaacatatatgtggaaaggtataaaattaagagacaccctcgaccctcacctgagttactgctcctaataaattcacgcatacctgagtgctgtgttttctagccttctgtgagtgggacaggcagggtagggatgctcggactgtctgtggtctctgatttagtcacttcgaggctgctgtgggagttcctctggggtgtccattcactgtcccctgtctgcctccattagatcccatctcaggccccttccaactctacacttctgacattcactgatgtgggtggaatgctgctttgtaaaaatggcggtgcaaatgtgtgctaattaccttgacatttccaagctgcttggtgctcagaactcatactttaggacatgaggctcacaatagtgatccacagcttgatctcttggacctgtgtggtaagaacctcagtttacagtgtttaaaaatcagatctgtgtaaaaatgtgactcctggcttctctcaacaactcaggactggtggcagccatgtccccgcatagacagtggattggaggcagggactgctccttagccggggtcctctcgtcccactgtaccctgtgaggactttgctccctggaggccctgtctgtatccgcttttgggatgcctgccttaaggattcgtagtacaaatctttataaacgctcactgtgtgtgtttgtgtttgagagtgcgcacatgaacaagagagagaaaaccaaaaaattacaaatctggaaaagttaataaagatctagaaccttatcaagattttgcaaggggtttttcttctgtaccttgtgactttcttccattttccatcccattcccatgagtgcctcacatttgtgttttctgttttgagattataattatgtagaaaccatagttctaaaactggaaagggccagaatttaatcacacttttgattttccaaaagaggacagagaaagactgggagaactgccagaggccacaccctgggaactggtgtgagtcctgaggctgtgcgctgcctcccaggagccgggctgggcctggcactgcccgcttggggggacaggccttcaagcaagctggaccaggtgtgggtccttgcctggccacttcctggctgtgtggcctgaggcaagtcacttcccttctcctggtctctgttgcctcattcagacagcaagtgtaatcatgcttgcttctcagaaaccttgtgagaattacatgagatcgtgtatttcaggtgcctctcgcattgctgggtgtgtatgaaacaggcagtgtgtggtaaccactggccatctgagccctgcgaaggggtcttgggacattttttcctcctttatcttaacaaattgaaaagaatagaaactctgggtgggctaggggaggagggtggcaggagagagaaacagaacgaaaagttagaatgggcctgagtaatttaaaagttacattttagagctcgatatagtttatcctttcttttggagataaaaggaaagggagtgggtaggcagacaaagatataaaaagcaggatgttaagtttgaaaaatgatgatgtaggttaagtccatccctgtagaggaacattctttatttgtgcatgtgccctcatgagctctgtctttaaagatagctgagtatgggccgcaggggagtgtttgtaaaggctctttgaggtctttggaaaaagatgctatataaagccagggagttattgcacagatctatgtatatatgtgagagagtgtgtgtgcgcacacatgcgtccacacgtcaccctgtctagtcatcgcagtcagcagtctcttccctttttaattttgaaaaggcagttgaagatcaatgagtctcaggataattccccccctgggggcctttagtggctgaagaagagacgcctctcacccctcccttggtgtcactgtttcattgctttatatagcagcctccgaggccgtaatcatttgtgtgaatgggcctgtgcgtcatctggctgtgtgtctgtgtttatgtttgggtccctggggactggaggctggtccctgctccactgttgtttttgaaattgagcattcatgtggtcactgccgagaaaggaggggaacggttttgtaggctcgtcctgtttgaggtcatggtaatgatgtatgggaccgtgtcccctcctccccatgcctgtcgcattcccgagatgcataatggaaaaagctcaacgggagcctgaatctctgtcactggggcaagaaattacagctgtgaacctgctggttagtgttctgtgccgaggccttgaacttatgattaacgtggttgacgtttctgtccagctcatcccatgctcagttcctggagctgagggtggcgttttagcagtgggcgactgtcagtcattcatttgtttatcaattcacttacgcatcttacctttgatcattcaccaggtctcacgtgtgttctgtgctgggcactggggccccggtactcaagtgacccacaggcttgggggtggggctttggtgggcagaggtgcagatgggcacctctagcccaggggacagtgtgctttcgtggaggtgcatatgaagagcaatgggaatcactgaactctacttggattgtttggctgtgaggacacagaacccatgccaatttagaacacaagggcacagaaccccataggggctcccccagagcctgggagccgagagtcctgcagaagccagcatggccatttgtgcatgactgctttattccctgtggccatgcggtcactgcaggtcggcccgcacttctcccgctggcccttgggtagccgccttggctgtggtggtgcagcaggagacgaaggcaggaatgaggagttcactgagtcaccttaggctacagggctctgtagtagcgcttgacatttccaacacctgccgctttgccagactcggcactttctctgtggctgagtgggcttgccttgaagggctttgctggctcccctttttggtggccctctgccttgtggctgcatctgcatttgtctctgtccaggcctctgtacatggcgacagaggagcctccagccaggggtcctgggcccagtttagggtttcatttaagggtgggtttgtttatttattcatttattgtttattttttgagatggagtctcactctgttgccaggctggaatgcagtggcgcgatcttggctcactgcaacctccacctccctgcaacctctgcctcccgggttcaagtgattctcctgcctcaacctcccgagtacccaggactacaggcacgcaccatcacgcctggctaatttttgtgtttttagtagagacgggatttcaccatgttggctgggatggtcttcatctcctgacctgaagtgatctgcctgcctcagcctcccaaagtgctggcatcacaggcgtgagccactgtgcccggccaggatgggtttattaaactggtcttttgagcacttggctttcggcaagtcactatttcagtgtgtctccacagtcaccgtggtggagtgacttggaactctttgctcttgggccagatgcctctgtcgccaccttccttcgcgtctcttgtcagcctgtggcacatctgaacttctggaagactctacatgatgggcttggtttgagtcagtaggtacccttggtctcactgattacaagtggggtgggtgggactggaggcctgtggaggctgagtctctgagcggaggcaagagtaagacagggcaggcccacggactcccacgactgctatagccagcaagccccagatgctcagaaaaggcgctccccaagcagaagcttgaaggacaacctggagtgagggagggggccaggccttccagacactgggaaacagcctgtgccaagacacagaggcacgagagaaggagagtgtgttcagtatggttggagtctaaccaagggggagcaaaggagatgggcagaggctggagcggcagagaggacatgggtctggagctcaggagagggcctaggtggagatgtgggtgtgtgcagggtggaagcggtgactgaaccctcggcatagatatagccttatattcacatagcaccactgaggccgggctccaactttttcattgcctatcatctctgttattaataatttaaaaaaaattttttttctaggcggagtctcactctgtcacccagactggagtgtggtggcataatctcggctcactgcaatctctgcctcccaggttcaagcaattctcccgcctcagcctcccaagtagctggaattagaggcgcctgccaccacacccagctaatttttgtatttttagtagagatgaggtttcaccatgttggccaggctggtcttgaactcctgacctcaagtgatctgcctgcctcagcctccaaagggctgggattacaggcatgagccaccgtgcccagcctaatttttaaaaaattttaactatatgacaaaaattgtatgtattcagggcatacaacatgatgatttgatgtatctctgtatttcgttatgactaccacaatcagatgaacatatacgccacctccccgagtgaacatttttttgtgttaatgtgtgtgatgaggacactcaaagtctgctctctcttcagatttcaagtaaacagtaccatagtattgttagccagagtccccgttgctgtcatgagatctgcagaacttactcatcttctaacagaaaattataagaggtacattttggccaacatcacccatctctctcacatcctcatgtacatacatatacatatacatcatatacatatatatcatatacatatacatcatatacataatacatatatatcatatacatatacatctatgcaggggaataatattcagccgtaaaaagagaaggagtctgaggcagcagtggccctcctgctgttccgtttctctccgtctgcagtgtcctgtgtgggtacagccagcggccccaactgattggcacagtgtcacagctgctgcagagctgccttcagccctgaatgaagaaggctgagagtggggcatggagggaagaacttgcgatgttctcctaagatgggctggcaaatgttttctggaaagggctggacagtagatatttcaggctgtgtgggccccatggtctctgtcaaaacaactcatcaaagcagacttgaacagtacagaagtgggtgggtgtggccgtgtttggggaaagctttactggtccctgctttatcctatgaggttggtgataccagcaaccttttccagtggaaggagctgagaagcaaggatgatatcatttgctgggatctcaaaccgaagtgtgagggacatgatattcaaaggtagatctgattagaaaactggtgttcaagcccgggcgcgggggctcacgcctgtaatcccagcactttgggaggccgaggcatgtggatcatgaggtcaggagttcaagaccaacctggccaacatggtgaaaccccatctctactaaaaatacaaaaattagccaggcgtggtggcaggcgcctgtaatctcaggtacgtgggagactgaggcaggagaatcacttgaaccctggaggcagagattgcagtgagccgagatcataccactgcactccatcctgggtgacagagtgggactccgtctcaaaaaaaaaaaaaaactgatattctttctacactgccagtttactgccctgaggagcttaaagttccacaaacaatggaccagttttttcttgcgtgtgtgttagatgtgcccttgatgtgcagatactatagcaaaattattatttccttagcggagttggtcttttgtttcatgttaagaaagatggcatatatgtttgttcagatacttatgtagtttttattgcttcatttcacatatttaaacattattgtaccagaaatgtatttcagtacattacaggagcagagattcattgaaatctggtgtcttacttcctaaatggttccttgctcagctgcatttgtggatgaatccatcctgtccacagcattttcaatgctgctttttatcttagatcagtttccattggttgaaattgacattcccctgtgctcttgcctggttttgtggttctgtcttctgaagccaagcaaggaaccaatgttgagatggatggttgtttgcctttcagcggtaggagaggggaccccgcagcatggccaggctctgcagaggccacagtgcaggagcgctgctctgtttcactcgaaatgtgagctgtggcaggtcataaagaggaaggaaatcacaatgatagagactaaacaaatcatgggctgcgcggctcaggggagaggagagaaaattacatgttcgggagctcctctgctcgtgtgtgtcactcgtacttggcgaagtataatatttacctgatctgtggaaatcaccccgatgttacctaccagctttactgcccaaaaagagtcacaaaacagccaatgaggcagcgaaagtgaatgtgtgttcaggttcaagcccgttgaaagaacattttggggggcatgccagctctcggtccctttctttcttctccaccgttaacctgaacatgatgtcatagctgtgtggggaaggcggaaggtctgacagctcgtctttctatgatggatttttaaaagattcccactaccagagtactgctttggctgcacttgtgatatcagtcattttgatgttgataaaaacacaggtgcctcgtccaagaggctggagatgcacggtgtatgggacctgggagggtagggaagggtgaggctagggtgatacagtggatcgggtcggcatccatcgtcctctgtttctcacaggtggttgctatgcagtgatttgggctcctgcaaggggggcttgtggctgagatctctcttttttttttttttttttttttttttttttttttttgagatgaggtctcactatgtcgaccaggctggtcctgaactcctgggctcaaatgaactcctaccttggtctcccacagtgttgggactgcaagcatgagccaccgtgcccggcctacatctcttaaggctacttgaggcagtacttgccaggcaagcattgctgtctctcaaacttcctgggaaacagttttttcctcctagaatttcctcctggaatataacattttcagctatgaggtctgagtagcagcactggggacccccttctcccatgcctgcaaggcccagaacccagatacctgctcttccaaatgccacatcgctgtctggggctgatttcccatattgccggtggtgatcttgtttcacacttcagaaaattctactatctagtctgctgctctagggcatagatcatttaaaaaatcttttttatttctcaaggttgaggtatacaggagctcagtaaatcccctaactcttgaaaatatgcccagtttaacccacttgggcttgtgaaccatacggctaccttatctccatcttcctatcttctgctgttgcatttctgcaaagacttgtagtgatactgatcagtagtacttgctaaatgctattctgtgctgggcaccattcctaagcatctcacttacatattgtcttactgaattcttacaacacttctaggagatagtaactgttaagatctcattttatagataagggaggtggtgctcagagggggttgctaacttgcccgagctgcagaggcaggatttgaacctgggacctgacttcagagactgtgctctaaaatccaggaccctgatcagccgagtctcttagactgttataggagttatttttgaaagggaaaagggaacttatctagacaagtcatccttaatagcatataatccagagaggtgagggcatgctgtaacaggcaagacctgccaattaatcttgactttgttttcttcccttaggtgaactgcgccaggccactgtggccatgatgaacaggaaggatgagctggaggaggagaacaggtaccgtgattttcaggcttgaggaatagcctctttctttgacattctgcctctggggaagacagaatataacagatgagggacattttgctttcttggcaaaaattgtgactggctatttcttatcgtcagggatatgccactgtggtatctctctttactgtggtatctctcttttgcctgatatgtaagaaagaagtgagaaccttatgataatggcaccttcatagaacaagctaagaatttggtagagtgatcattaattcttttttaaaaaacagcctttattgatatttaattcacatacactataattcactcatttaaagtgtatggccaaggcaggtggatcacaaggtcaggagttcaagaccagccttggtgaaaccccgtctctactaaaaatacaaaaattagctgggcgtggtgctgcgtgcctgtaatcccagctactcaggaggctgaggcaggagaattgcttgaacccgggaggcggaggttgcagtgagccgagattacgccattgcactccagcctgggtgacagagcgagcctctgtctcaaaaaaaaaaaataaaataaaataaaaaaataaatgaagtgtgtaattcagtagtttttactatattcacaggagttaacatcaacacagtcaattttagaacatttcatcacccccgaaagaagtcctataccctttaattatcacctccttagcctaggcagtcttttttttttttttttgagatagttctggctctgtcacccaggctggaatgcagtggcgcgatctctgctcactgcaacctccacctcccgggctcaagtgatcctccagcgtcagccttctgagtggctgagactacaggcgcatgccaccatgcccggctaattttggtatttttagtagagttggggttttgacaggttgcctaggctggtcttgaacttctgagcttcagtaatctgcccaccttggcctcccaaagtgctaagattatagacgtgagccactgtgcctggcctctaggcagctgttagtcatcattaatcaaaggcctgtctatctaccatgttgcaggcatctgagcacttatcttaaagtttgcccaaatcagggatacttagggcaagatgaaattctggctcccatctgacttatcttgactgtggggtggtcatagagggcttacctgcagttaccccctgaacttctgcaagcatgattcaactgcctccctgggacgtggggagaggggggtgtgtgttcacgtcaccctttcttactcacacgctcttttacacacagtcatgattctccttcaaacctcatttttggtcctgcttgacaagcttctctcttgtcctttctggaaacatataaaagcaaacaaacatgatttctaaaacaaaagaggatgtcttcaaaaggaatctttagaccgcaccattttccaagtagaataaactttcaatagagggcttgcgccattgagggattctttgtccatgctccagctggggctgttatcttggaagaagccatagattttgtcttaccttgtgaagaacaatagtcactgtctgttacttttttgtacttcccagaaagaaaagaaaaattataccatgtttttgtcagggagccccaggccccaagaggggaatttcctcaaagctctcaaggaacacaagtcttggagatttcagtgaatgatcagagtgtggtgggggtcagatgtttttgattatattcttttttttttttttttttgagacggagtcttgttctttctcccaggctggagtgcagtggtgtgatctcggctcactgcaacctctgcctcccgggttcaagcaattctcctgcctcagccccccgaatagctggcattacaggtgtgtactaccacacctgagtaatttttgtatttttagtagagatagggtttcatcatgttggccaggctggtctcaaactcctgacctcaagtgatccacccgccttggcctccctaagtgctggattacaggcgtgagccaccctgcccggccttgtttttgcttatatcctgatgtcacgtggcaagtgtcctctggatttagtatgtagatgtaccatggttggtaattgttttccagaaacagccaggtagaatgaagtaaatggttagcagcaccatggttggctctctcctaggcggtcactggtgatggtttctagaagacctgctgtcttctcctttatttaagaccagggatgacaaatacacaggtgaatcctgtgctggctgccagccccctgttggagggttaacaaacttgggaatgtaaaatgctatctctgctatctcagatgctttagtgatataagatattttttatatatgcttgtttcacctgaagttggcaatgaaacaggctcatagtgtgttttataggcacaggtggaaatgagactagacgtttatgagataatctgagtatatattctatttttatgcctcagattattgttttggcctctcctggcatcctttccttggttaaatctctgacctggtgtagctgtgacaaaatggtctcattgtaatgtgctacacctttgagtggggtatctgtaaagggacttggctggaatttgctcacctcattgttttcccttgatttaagctgtcagaaggctggcctgctcgcaggcaatcagggacatggagcccaggccatagatgactgtcccttaattcttactctaaggctatcaattagagtttgctatctccagttcacatgagatagacttgaattatggtttatgcagagccttgtggaaaacgcatggcttaggacttgacttatgttaggaactgtgtcctgggctcagtggggtctgggttgacagcttctgaacagatgggtccctctcttcccagatcactgcgaaacctgctcgacggtgagatggagcactcagccgcgctccggcaagaggtggacaccttgaaaaggaaggtggctgaacaggaggagcggcagggcatgaaggtccaggcgctggccaggtaggagagggtgagggatggagaggtaagcacgtgggggcttcattaaaacctgagcatactgggccgggcacggtggctcatgcctgtaatcccagcactttgggaggccaaggcgggtggatcataaggtcaggagatcgagaccatcctggctaacacagtgaaaccccgtctctactaaaaatacaaaaaattagctgggtgtggtggcgggtgcctgtagtcccagctacttgggaggctgaggcaggagaattgcttgaacccgggaggcagaggttgcagtgagccgaaatcacaccactgcattccagcctgggtgacagagcaagactctgtctcaaaaacaaaaacaaacaacaaccaaccaaacaacaacaaaaaaaaacctgagcacacgttcacctggactttttagttaaaaaaaaaaaaaagccgggcatgatggctgacacctgtaatcccaacactttgggaggccgaggtgggtggatcacgaggtcaggagatcgagaccatcctggctaacacggtgaaaccccgtctctactaaaaatacaaaaattagccgggagtggtgacggacgcctgtagtcccagctacgcgggaggctgaggcaggagaatggcgtgaacctgggaggtggagcttgcagtgagctgagatcacgccactgcactccagcctgggcgacagagcgagactccgtctcaaaaaaaaaaaaaaaaaaaaaaaagatagcgactaaagcaaaaaaagtgtgtattttaatttaacttatttcattgagtaaatagtatatatgcacgtggttcaaaatacaaaaggtgaacctgtgcaagtccccttctcttatcccagccacccagtttgctccctagagggggtcattgttactgttcccagagatattccctgtacacacaagcagataggtgtgcatatactttttttccttttctttcccttctcctcctctctttcttccttaatgtgaagtggtagcctgtcctatgcagcattcacttgacatctcagagattgctctcgttggtctgcgtggggctgccctctgctttttaagagctcctgacatttccttgtctgactgcatcagaattcgtttaaccagcctgctgacagcgaggcaccgagatggtttccagtcttttgctgctactaataatgccacagtgaacaacctttgcattggttgtttttttcctgtatgagtatatattttggaaatattcctggaagtaggattgctgggtcaaagtgcagcgcatttgtaagtcggacagggaccatcaactcgcctggcacgggtgtgagccgcatgttctgcagcagtgtgggagagggcctgctgcgacgcagctgtgctctcacagccatgggatccaacttctgggtctctgataatgccaggggtggaaatggtgctggcagaaaatttttcattaccatttctctaattaagagtatggttgagcctccttttatttaaaagccattttatttccttttctgtcactttgtttatatactattaaagaaagctgcaaagtaaaccaccccagatcccaacttacatgcatctttactgaatttgttcatatactaacatttttctttaactatacatgtaatctatgcctgtgattgtttagtctaccttctagcactgcttaggagtgcaaaagcagcttttattgtttccatataggcctcatgttaaccatttttatgtacctggatgtggtatttgattgagtgaacccgccatattaaattgcccattccagattggaatgatgaatttaatatggtcaatttagcattcaggttgtttccagtttgtcctcattttaggaaagataagcagtttattgcttgttctgtaaatctactttaaaataagaccacgagataaacacgtcttgtggatgtgcaagggagcccagagttaagtcagtttatagcagcagcatttacctctctgtgctgttagatgctgtgaatggctctaatgtaattgttttgtatgtcttattgaatgttggcgctatgatcctatgttggatttccaatctttgagcttttcccctttcgtcacattttaaaatgatagctcaagagcatcaaagacagtttaatgactgttataaatagtgtaaaatgtgcctagttcggcattttctcacctggaccacccttttgcctggccatgctagagttttgccgcataattgcatttaatgttcacaataaagtctgaagtctttagaggttctggttcttagtcagcaaagagagacagaattatatgccctgtcttttttttttttttggatggattcttgccctgtcgtgcccaggctggagtgcagtggcatgatctcggctcactgcaacctctgcctcccgggttcaggtgattctccggcctcaacctcccaagtagctggtattacaggtgcccgccactatgcccggctaattttttatatttttagtagagatggggtttcactatgttggccaggctggtcttgagctcctgacctcaggtgatcctcctgcctcagccttccaaagtgcttggattacaggcgtgagccaccatgcctggcctccgtgtcatttaatggcttgtattagcagtcagcgtagtcttgagtctttgcatcattacttgcaaattgtgtgtttctgggtgaattgctcaacttctgcacatatgtgcttcctcatctcagggatggagaggatgatctcatctagctgaaggggctgaatgaggaggaaaagatgtgagggtgcatatggcagtggacatgagtgaggcgtcttaagtgtattccacaggaagcgtgttttagtgcatgacaattgttgggaaaattttatcccatagatggggtagataaaatcaatgtcctaaccaggcagttttataatccctatttaagcagtgggttgctaagagtttaaggtgtctgaaagtttgcagtctgtaggcagaaggaacagatatctgtaaaacagaccagtatttcaaaaggaaaaactagaagcagggaaaccgatcagctgggtatgtaagttttgaaaaattccattgctgacatgttccagatagagttaacctctgccagtggtcagaactttcttcttgcttctggccagagtaaaagcaactgtcagtgttggctgacagtggcttgctcgggcagttgttgcctgggggtggggatgccgtagctgctggggcacagggcagggcagtggagtgtcgcaggctggaaggtgaggctcattgcgccggcgccatgctttcctcaggtgtgtgtgtgtttaggtgcaggtttcacagtgcaggtggatacagctagggctttatggtccaggtgcctgccttgtactgacggggtcagaccatggctctcctgcttactagttgtgtgaccttggatgaattacttaacttctctgtttctgtttccttagtgtgggtttttttttttttttttttttttttttaagatagtatctcactctgtcacccaggctggagtgcagtgatgcgatctcagctcactgcatcctccgcctcctgggctcaagcaattctcccacttcagcctctgagtagctgggactacaggcatgcaccaccatagccagctaatttttgtatctttttgtacagacggggttttgccatgttgcccaggctggtttcaaactcctgggctcaagtgatctacccacctaggcctcctgaagtgctaggattacaggcatgagccactgctcttggcatgtttccttagttttaaaatggtaataagtaaactctttacctcatagagttttgttgaataaataaaacgagagaccatgtattggctcaatgtgcttgataaatactcagtaaatgttaactatcattatcgtttttcttaaatataataattatggcaccttacttcatcaaaagttctattttaacagcgatagtgcagaaagaattaggagctagtctatctcctactcagaaaagtgagatattcgaatgctaagtatgcgcttgtgtatatgtgtgtttcactggctctgagttcatggttgtaaaactgagcatcactgagcaaacccagcatttgattacacattccttttgctaagaattactggctttcctagaacaaggtcatgtaactagcctggtgctttttggccctgggcagctgcgagttcctgaggcagaggcataataatcatttgcaattaaggctctgtaagtcacattccttgaaataatcgattgccttgtttccttttgaattaagaaagctcaagctatgagacatatgttaaaaaagacacacatttacaggaggaaaagtggctttgaaggaagcaagtaaatgggttcttgaattattgtggggggtcattttccaattcttgtcatcgtattatggcagtgttagctcttgctgtgtaacaaattatcctcaaacttggttgctgagaacaacaaatatttatgattccccacaatttctgtgaattaggactctgaggatggcttagccagggcatcagggtctctcatgaggttgcagtcaagctgttggccagagttgctgtcatctgaaggcttgactggggatggagggtccacttgcaagcttcatcctgtggctgttggcaggaggcttcagctcgttgccacgtgggcctctccgtggggctgctcccaacacagtagctgacttcccagggtgcgtaacccaggagcaggagaagagagcgcacccaagatggaagccaccatgtttttaacaacttggccttggaggtgacacatgattgcttctgctatattctgtagtcacagtcaaccttggttcagtgttgagggaaacacacagtggtgtgactagcaggaggcaggggtcactgaggccaccttgaaggctgcctgctacactcatcaggtatctgcttcctcctggggcagatactacttgtattaatgttagggtcatccagagaaacagaccaataggatgtatgtatatctctagaaaggggtttatcgtaaggtattggctcatataattatgggggccaagaagtctcacaagctgccctctgcaggctggagagccagaaaagctcatggtgtagttcaaaggcccaagagccagagaacctgtggtgtaggttccagtctgagtctgaaggcatgagagccaggagtgccgagggcaggggaagagccatgtcccagctcaagcataggcagggagagaactcaccttctttttcttctactcaggccctgcttggaatggatgatgcttgcccacattggtgagggccatttgtttcactcagtccacaaattcacatgctaatctcttccagaaacatcatcacaggcacactgagaaattgtgttgatctagctatctgggcatccggtggcccacacacatggatatgcaaaattaaccatcacactcccccaattttccttggtggatctttgctccttcctttgtgtccatgtggtttgatggggctgtccctgccctctgcccctacagggctccagaggatggcagcccacccaggcctggacagttgggttgctccatccatgagggctttacaggagggcatgtgaccaggatggtctgataagagccagttactgcattcttgagaggatggtgccagccagttctctttgctattttgttggcagctatctttgctattttgtgaggagattctaaccccacgtgagaaccatgtggtggagaaatggagggagagagaaatcaacagttcctgatagtctcatttgagctcctggatccagtctttcctgaagctgtgtttcctctggacttttcatgtatgtgagccaataaattgctttcattccttgagccatttgtggtggtttttctccattatactcataagagtcctgactgaagaggcctcttgtttggttattagagattggagcacgtgtattttctctgcacctaagtagacatgtcatctcaacaatcaacctgccaggtccaggaaggggcttctggttggttgagagtcaccaaggtggtggagaaagtgttcctcggggggagccccttggactgcttctcagagcaccgctccagacttcccttcgtgtatgtcactgggaccggcctcgcagttactcttctgtcgtgactcagagtgccgctgcagacttcgcttcttgtgtctcactggggccagccttgcggttactctcctgttgtgacttttccctccttctgtgcagttctgctgcactcacatgaacatgttgtcagtggtatggccggggccattctcttcatgcttctgagcctctctggttctttaactatttagaaacttaaagtggggctggggtggcatggaacactctccctccttcctcccgtgcagtggcataaagcaccctgttgatgcgtcacggtcactgctggctttggagggccgtgtccgacccttacctagggaagcagcacagcacagtgattctggtcttggctctgccacttggtaacttcttaattctcagtttccccactgatgctaacatgcctttgatggcagaaacccacaccaaattagcttgggtcaccaggggatttttttcttgcagtagctgggaaatccaaggacaggtcactttcttcaagcactgtgggacccaggtcccccaatgacaccagtgcactctccatcttcccttggcgccgccctctgcgcactggtgtcatgcttaggaaggccctctgcatagagcaaagatggcctctggtagcactgagactcgcacaggatccaaagggaagagactctttcctaatgtctgtatataacattttaggaaaggtttttgttgttattgttgttgttgttttgagacagagtctcgctctgtcacccaggctagagtgcagtggtgtgatctcagctcactgcaacctccacctcctgggttcaagcaattctcctgcttcagtctcctgagtagctgggattacaggtgcccgccatcacgcctggctaatttttatatttttagtagagatggggtttcaccatgttggccaggctgctattgaattcctgacctcaaatgatccacctgcttcagcctcccaaagtgctggtattacaggcgtgagccacggtgcccagcctaggaaagactttttagcgggcatgttatggctaagagtcagcagagggccatgattgacagtcttaccaggtccccaaggcaagcagcgggcagcaaaagcatgtctcttgcattttttcctaggattgttgggacggttacatcagctgaggctcctaagcactcagcatagctccaggccctcagtaagcgctcagtgaatgtcacctaatttcttcttcttggctggtgtcttggctgtaggtggctggggatgctgaggcgaggccagaatctcttgggccctttccttgtccaagcctcccctgcagtgagcatcttagagcccttggcccctggccttcacttgaccttcagctcctcctggtgttatttttccagccctgcctgcccagtgtgtgtccctttgtttatttgtccctgctgggctgctgagcagtgagaacttccttgacagtgttgtgcatgtgagattgagaactgtactgtacatcctggaatggccttgggagccctgctcagatcatgctgtcctgcaccccaggcgacctttattggctttctatgaaggctttaaatctcacactccaccctgagggtcagcctctgccttcctttgcttttaaatcattggagaaatatgaagactatgtcctttgtaaaaaaggacagtacatttcttcagtgtccattcaaaggcactgattatatttttatcacaagagtcaaatggtgggaattgagaaggtcaggcatactgatttgaattatggggaatactggcttgaattccagcccagcttgggctagggatggcctttggaatcaagggtgtgggccgtttcattgctatctccccagttcagaacacctgctctggcgggaaaagccagtaggcttcatcctgctgccaactctggtagtcgctgcctgggattctggctgagaaggactggagtgctgtcaggactcaacagaaaagagtgttgttattgattagcaatgtctgccatgcccatgggaaggggatgtggtagcaagcctgccaagaatttgccatccatatgctagcacttctggagtcttggaaactgcttgagatgaggtccccaggccaagatggcagcattgtacacgagactgaaaaaaaaagaatttgtcactctttttttttttttttttttgaggtggagtctcactctgtctcccaggctggagtgcagtggtgcgatctcggctcactgcaacctccgcttcccaggttcaagcaattctcctgcctcagcctcctgaggagctgggactacaggcatgtgccaccatgcccagctcatttgtatatttttagtagagatggggtttcaccatgttgtctaggctggtctcgaactcctgacctcaagtaatctgcctgccttggcctcctaaagtgctgggcttataggcgtgagccaccatgcccaacctgtcactgttttatgaagcccacattattatattctgtttggtaaaagaaacatgctttggaggaatatcttaaattcataatgtaaaataaaacaaaactttgctcttaggcttagtagagaccagaaataagacccagtttttgttacatgtctttcaaaaattaacatttgctttgttacctgatttaggaagcctgtgtttatggatgagaggaggggaggaagagaggggttctttcactagaagaagagttgctgtagtggacatggtattatcactaggctgctggcaaaaggcaccagagctgcctcttgactttctaggtatgtaggtgagtaaactttttttgttcaagagagtttgagtggggctttctgtttctgactacaggaatacagaaggctttgttggtcaggcacggtggctcacgcctgtaatcccaacactttgggaggccgaggtaggtggatcactgaggtcaggagttagaggccagcctggacaacctggtgaaaccttgtctctaccaaaaatacaaaaattagctgggtgttgtggtgtgtacctgtaatcccagctactccagaagaataagagaatcacttgggcccaggaggcagaggctgcggtgagctgagatcggccactgtactccagagcctgggcgatagagcgagactctaaaaaaaaaaaaaaaaaaaaaaaaaaaaagggaggaaggctttgtgcagcatctcctgcctgatcgtgagaccgatcaggtccctctgagatacgcttcatgggagtaggtattcctgaatagcgttattactgacagtcacagtccgggttgtcatccacgcactgcctgtcttcccttttagactgtgcgatccatgagggcagtggcccgtccttgcacctagcacagtgcctggcattgctcagtcatattggctaaatgagggattgaagggaccgtggggccagtgactgtcacttggtatgagtgtcactgagaaatgtcaattcttccagcaccttaattgttctcctcctgttggcatcttctcttggcacaaagcagccagttaggctgggctttagacctgtggatggtcgtttgccccaagatgtatttttagtcattttctgggaattggggctttctggaagcccctcagccattcattgaaatcttaccatatagaggccaggtgcagtggctcacgcctataatcccagtcctttgggaggccaaggtgggcagatagcttgagcccaggagaccagcctgggcaacacggtgagaccctgtctacacaaaaattacaaaaattagcggtgcgtggtggtgcatgcctgtggtcccagctactcaggaggctgaggtgggagaatcacctgagcccaggaggtcaaggctgcagtgagctgagattgtaccactgtactccagcctgggagacagagagataccctgtctcaaaaaaaaaaaaaaaaaaaaaaaaggaaaaggaatcttaccacttagagtcagtagtaggtgacagaaacccaccctaaactgcctaagaaaaagagcagttgattcgctcatgaaacttaaacctacaggagaagagctagctttttgctgggctggatcaaagctctcagggggtatcacgcatatcatgcagtccccatgactttccatgtctcctctctctttccctcggtcttggcttcattcttaggtaactcttctcttgtggtgacaagagggcccccaggggccccagcctaaatcccatcagtttaacaatgccagtgggaggagaagacttttttccagtagctctggagaagtcttgggattcactctctcatttcccgggccagctgtgttacttttcctgcccaagcctgggtcccattccccctggagctgggggtggctggctttccctcacctgaactccgtggagcaggaacaaggatggaggagagtttgcttaaaaggaaaaccaggatgttcctcccatcagattgggggtgcatgcggtgaggtgcagcctgcagatgtccctgacagtgggttgcttccacagagggcttgtgacgcttggattctgtccattttccagagtgacactaccgtgctgtcactcttgtgccagctgtcttgcgcaccctgtcttggtgggtgaaatctgggctcagccattctaagcggtagcccgaaggtctctgtgctgtgttctccattgtgcttttccttggctagatatttcggtctgatataatctgacattattagcaaaccgctggtccagctactttggcatatttggacttgatcttagaagactcaatatctgttttaaataaaaatatttggtaatgcccccttctgaaatgaaatttatagcgaatataacctacttatacaagtaatttaaaaaatcagtataacactctaatatgaaagagaaatgaaaggaatttataatacaaaatagatttcagtacatattggtctggcgcaactgtgctagaaaacatgctgacgctaagtgcttgcacctccttctcatggatgagttttgattttaagaagttaagaagatcagaagtcattctttagaaggagtccagaaaaagagcagagagtgggtgaaccgtaaagtaaacctggcatagtcagtatatatgaaaggcattcctttctaggctcagattatgagtaaggtttccgcctacatgaatggccacaggacgattgaagtgttgcaggaagtaggctgatcttggttgtgtggtactgccttggcctttcaggacagttagtatcctcggctctatgctgtaaatgctggtagtgctaatggaaaggggtcttgattcagatcccaagagagggttgttggatcttgtgcaagaaagaattcagggcaagtgcttaaagtgaaggcaagtttattagagaaagtaaagaagcaaaagaagggctactccgcagacagagcagcggcatggaccaactgacttagagtacttatggttatttcttgattatatgctaaacaaaaggcagattattcatgagttttccaggctcggggcaggatttcctggaagtgacggttcctcccacttttagaccatgtaggataacttacggacattgccgtggcatttgtaaactgtcatggtgctggtgggaatgtccttagcatgcttatgcattctaattagcacataatgagcagtgaggacgaccagaggtcacttttatcaccatcttggttttgctgggttttggctggcttccttacagcatcctgttttatcgtcatggtctttgtgacctgtatctaatgacaccagtcctcctgacctcccatctcatcctgtgactaggaatgcttcacttcctgggaatgcagctcagtgggtctcagcctcattttaaccagctcctattccagatggagctgttatggttcaaacacctccaacaatagcactcatcatcctcgtgatgacccagactgtccccacggcccccagtgagaatctctgctttagctctttcccaagtgttctctttttcaagaccatttacaaatgtattggaattttgtgtgcaaggtccctttcagttgccccgatctttttgagtccttgtctagagactggatccagtccacactgaacccactgttgagcacctgctgcatatgtgacccactctggctctcccacctctcgcctctccttgggcatgaagcttgcttccccaaggtcgctggctttttcccttggctgagtctcctgagctgagtgagttgtgcccttcgccattgttaagcacatgcttgtcagcagctggctggtctcatgatgtaccccagagcagccaaggagcgttgagtgcatggggtgggtggggctggtgttgggggctgggggtgagtacaagatacacatgtcagtcaagagggaatatggcttaggaggagctgttttcctgcagtttgatgctactgatgaaattcagtcaagatgaacgattgatattgtttgtttgtttgtttgtttttgagacggagttttgttcttgttgcccaggctggagtgcagtggggcgatctcagatcactgcaacctctgcctcccgggttcaagcgattctcctgctcagcctcccaagtagctgggattacaggcgcctgccaccacgcctggctaatttttttgtatttttagtagagacggggtttcatgttgaccaggctgatctcaaactcctgacctcaggtgaccactgcctcggcctcccaaagtgctgggattacagacctgagccaccgcttctggccgatattgtttatttgttgattcactcttcaaacatttactgttccgtgtgaagcttagtcaatcagagagaaacacaatacagctgattctgtcctgtgggtgctagaaattgaagggaaggatatgcaagcaaagaaaattttttttttttttgaggcagagtttcgctcttgttgcccaggctggagtccagtggtgcgatctcagctcattgcaacctctgcctcctgggtgcaagcgattctcctgcctcagcctcctgagtacctgggattacaggcatgcgccaccatgcccggctaatttttatatttttagtagaggtgggtttctccatgttggtcaggctggtctcgaactcccgacctcaggtgatccgtccacctcggcctcccaaagtgctgggattacaggcatgagccactgcgcctggccggccacaagcaaagattttaaccttcagtctgacagctccaggagttccattttcgtggggctactctgagcaggaagtgtcgtatggggcaggtgtggacttgagtcctgcttctcagggttagggcaagggtgagacaagtgaggcacctacgctgcttaatttaaggcggtgctcgtccttagtgtcatgcaagggcttccaccgctcctagatgtgggatctgagatggccattttacctctcaggctccctatctagaaaaccacggtggtaacagaccctcccttagagagaggatgaagagagattgcatgtcaagggttaagcacattgaataccctgcgtaagtactgagtaacagacagccatggtgattactgttggtttcatggaagtaaattatgcctccatttcaagcctgcaaaaagtcattctctgcagttaatctagcctgctgttgctcagatgtaactagcttcctaataaagaattctctgggttgaagagcgaaatatgttgcttaaactttgctgaacatcatagtcacctggggagcttttaaaatggttatgtccaggctgccctccagaccaattaaatcagaatctctggagctgaggcccagactctcaggtaattccagtgtgcagtcaaggttgacaactggtggcttagagcagagtttctcaaaccttaatgtacccacgaaacacccggggctcaggttagagattaaattctcattgagcaggtctggagtggggcctgctatcctggagttctaataagctcccaggtgacactgatgctgctggttcctagaccacacattttaagtagcaaggacttaagagaggatgccaggaatgatctgaacggataagctcattgaaaaccttagaaaggctgatttttagctcagaaccaagttgggagctaattttttgttgcttggctggtttgaaaaatataaagaatagtatgacccactgcaacaattagcactactaacatttgtcatttttgttttagattttatttttaagtaaaccataaacaacatgtaggtttgtgctatggttagaaggttgtccctctaaaactcatgttgaaacttaattaccaagcaacagtataaaaaggtggtaccacctgagaggtgattagaccatgagcgctccaccccccatggaggggaggtgcgattcatgctgttataaaagggctagctgggctcctttttccgttactgccttctgacctatgatgacgcagcaaaggtcctcgccagacgccagccccttgatcgtggacttcccagcttccagaactgtgagaaaagaaatttctgttcattataaattacccagcctcaggtattcggttatagcagcacaaaacagactgagacggcttgctttgtgggtatttatttttttgagacggagtctcgctgtgttacccaggctggactgcaatggcgcgatctctgctcgctggaagctcctcctcccggattcacaccattctcctgcctcagcctccccagtagctgggactacaggcgcctgccaccacacccggcaaagtttttgtatttttagtagagacggggtttcaccgggttagccaggatggtctctatctcctgacctcgtgatccgcccgcctcggcctcccaaagtgctgggattacaggcgtgagccgctgcgcccggcctctttgtgggtttttaaggatctgcctctgagctttcaacgtgcgcccactgttctgcaacttggtttgctcacccaatgtaaagctgaatggtttcagattaagatatacacaagtgggattctaccatggaattctgccatacctgagatttcttgagggaactcttgttttcatacttaaaaaaaaaaaaaaattacctttaaattgtgaaagcagcataacaactcaaaatggggaaaagagtcccaaatcccatgactgtagcgtgataattatttccattcttagtccacttaagtatatttttacatagttacaccactgtttgttgtgtacatgcaatttacattctgtttattttattctgttgctatgtagatttcaaattatgtttaaatacaagattttttttccctgttcataaatgtaatgtgtacgttcgaatccttaaggtttttcccttaagttagggtatttttcccccctgcatatgaaagtaatttgcaagttagaattcttaagtccgggaataccagaaaagtttaaagaggaaaatcacctgaacacaattaccatcaatgaatttattatttatggggcattttattccagtttatttttatgcatatatgtattttatataattcaggtcattctgaatctataaattgagggtctactttgaaaagttttttattacaataatacagtaaacaacagacattgtctcatgttattcagttccatggatgtcacttgatggctttgtggagttctgtgtttggatatgtccttgtttctcacatcatttttcttaaccatttttttcccttgtaggattagtatttctatgaacttgtatttttataaacctattccgccttttaaaaatcatttccttcagctagattccaaaaagtgaaattcccatgttagaaggtaagcatgtttgtaaaggctcttgatcttgtgttactaaaatcctttccaagaaagcggcctctcttttacccctacagcggtgagtgagagagcctgaccagctgtgatttgtaacggctgtgtagcattccttagggtacttggtggtttccacctcgatttgcattgcagctgcttccagtgtgagcttatagataaaggctgcagtgactatctcagtatctgtgtgtatttctctgtccgtttctttccttaatgtgtatttccccaagtgggatctcagggcaaagtatatgattttttttttttttctttttgaaggcagagtgtttccctcttgcccaggctagagtgcagtggcacaatctcagctcactgcaacccccaccttccaggttcaagtgattctcctgcctcagcctcccgagtagctgggattataggcacgcaccatcatgcccagctaatttttgtatttttaatagagatggggttttgccatgttggccaggctggtctcgaactcttgacctcaagtgatccacccgccttggcctcccaaagtgctgagattacaggtgtgagccactgcacccagccaagagatatgaatgttttcatggcccaagttcttggcggcaggctgaggtgggagggcctgctcatcagaaatggagctagttctactaccattcatcactgcttggctcctgcatctgtggctgtggaaggtgaaggtatccttggcatgaatgatttctcagctcgtttttcttttgggattaatgatgtgggactcccaaaggtgggagaatggaaatgccaaatgctttaatgttgaaatttaaaataatgggagcaccttctcaaacatgaccaacagtggaaagccatataaatttcttcatgagcctttcagaattttgtaaccagtataggtttcctagatagttttttaaaatataaaatggtagagacagcataatgggagaggaacagaagcttggtggcatctcagagcaatcacgtacaagggagaaagccatgtgcttgtttattttctctaatgcttctagaatccaatcaaagactcaggttttgttgacgaactcaactttttagggagcaagcagcaaggtatatttgcatgaacatctgtgttttgaagcgcgtgcccgcgttgaatggttgagcgtcagagtcattagtacccaatgccagatgttccctgaaaaatctgcaccaaacacagacttgggcagttcatcaagatgtgaaaaacatgcagctgttaagggaaaagggagaaggttgtgtctgaaatgttgctccagcccatcgctttcccccatcaaaggacagaagcaggaggaaataaaaaaaaattaccaaaacccataaatatgacagaactcttatgaaaaggttacggtaattattcaccggggagggaaatgcttttcccattcattaatgcttcatttcttgtcttttctaatgagaagtaggtagaggtgtctagagagaaagaaaaatagcagaatggttttgagggataccaaaagagcccaggaaaggtgaacaatgggaagagaggtgtggccactaagtaaatgctggtgtttgagttacttccgagaaatggttggaatgaaacagctggatgtagccgatccaaggagccgcagcccgtggctcagtttaacccccttgactttccctctttgcctccggagaggcagaatttgcagcctgattattcgtagaaataatttttcaaatcttgcctttccggtacggttcacaaggtggcaatttccatgtcactgaacatgaagcctgggtcttaaatatagccaggatgtgaatgccctgcaggcggtgacagtggcaatgtgacatcactgccaagcaacttctttttattttggagcctgggaggggaacaacaggaagctgggcagaggggagatattcttggcagcagcagcagcgatgcagtttaaagagagacaactgtcaaggctagtgactgagcaaaccagagttcgctgaattcgtactggtgccaaacatagccgaagcaaagatgtgtgagactcgtacctgctgctgctcagctccagccaccaagtagccatcatgaaaatgttttattttaagcagaagaactttccttcaaatgcattcttacttggaagctctctgagacccgagagagctccctgagagctgagccacacaggttaaagtggagaggtggggtcctggaatgccacccatggagctacaaaatgccctttgttatccatgttgaaaaggccacttaaaaatggcgacctagcgtgggataggcttgcctttgagcacattccctcttgtttctggtaatgtgagctaaggagctgttagggctgaactaaatccacagatggtctctgcctctctttctgtatctggcaaggctctttcccaagtttgttagggagttgacgttagctacatcttagtagatcttgtttttcttgtttttcactcatttgtacctcagattttcttgtccaatctccccctcccctgcatgattagtccctcttattttgcttaactttttcttatttccatagcatttcttgttttctaatacatcacttcttagattcatgatttatcactgccttttggtcttaagttttaagcctcatgagggcaggagcctttgtcttgttttattttattttatttttctgaggtggcatctcgctcttgttgcccaggctggagtacaatggcacgatcttggctcaccgcaacctccacctcccgggttcaagtgattctgctgcctcaacctcctgagtagctgggattacaggcatgtggcaccatgctcagctaatttttttttgtatttttagtagagacagggtttctccatgtttgtcaggctggtctcgaactcctgacctcaggtgatccacctgcctcagcctcccaaagtgctgggattacaggtgtgagccaccacgcccggcctgccttcgtctcattagttcaccgatagatctattccaaggagcctggacaatgcctggcacataatagagctcagtggatgtttgttgaatgaataaatgagcatttgtcagttacttctaagttgttgttctgctgtgtttggcttatgtttccaaggtgatttcatttcatggtctaaagtggctgctggagccccagccctgacacctgtgttcttggcagcaggaagggtaaagcaggagaaggggagaaagtgtgtgccaacttctcgtacagaggttaccgcaagtcactcaaacactttctcttacttctcactggcctgaacttactctgctagggatgctgagaaatgtgatttctgttttttagtggagcacattgtcactccaaataaaacagaaggcaagtagtggtctgtgcttagtgcctggtacatagtaatctctcatgaggaaaattcacttgttttgttacccggggtcatgagggagtatatgctctgttctgtagtcgtcagtagatcagattgtccctatagtgattaacaaatgaccttttgattcacaaagaccttgactctaatccctgcagtaagcacttgctagcattgtgaccttgggcaagttactgtacctctgtgagcctccgtgtttaaaaatcatgaaaatgggaaaaataatagaacctacctcatgggtattggtgaggattgaattacataatgcaggtaaagaagtgtggggctgctgtctgagacacaggaagctaataaatgaaggcagttctatatcatcctatgatctttaccagcctcagtcaagtatggtttctaggtgctcaggactcaaggatcacagagacatccttctggaagttcccagagtgcactccagttagaacagtttgtgccaagggggagaggcatgaaggaagatgctgtgtcaaggaagcttcaggttgctccctgtggctgtatcctggaattctggagtccagagtacgtttggggaacgattgagggtggggtttctgcaagggtggcctgggaacagattcccaaggtcccaatgaggagtttggcctcggttctgtggatagtgggcaactattgaaggcctttaaggagggggagtaattgatcagatctgttcgagggacagagccataatcccctcctgggcattgtggagaagtggataggaggaggccagggtcggaggggctggaagttctttgagctattcaggcgagagatgatgatggtcagatccaaagcagggtgaatgcttctagagagagagactgggtagatcaaccatgataagtatgattccagttgtttggttcttggattagagtctgtcttcccggtagactttgctaccaggggttaaggatggataaacaagatgtgaatgaattatttgcctagctcctcaaggtacgaggccagacctaacccaggccttcaccagcactggcgtcttcagtgagattgtgccgcctttgttaacctgagtcattgaggagcagaccttttgaagagtgagtctgcatcacagctttaacaacctgagccctgtggcaggtaattgtgaccaggaacagcgtctaatgagctaatttttgtccagtgatcacatcttgagatagtgtgcgtgagctgcatccctttgtaattgccacggtcacagtatcgggaggccccaagtccgtgaggaggaagttgtctttgggtcaccagcaaggtcacagcctgtggtttgggttcatttgtgcagattggggctaatttgtttttgctcttttatctgaattggaaattgctcagccaggcaagagatacggtcatttaacagacagaagcgctcagatggaggagggtatgaggccggataggacccctgttttcctccaaagttcatggttactggggatgtgaccttggctttcagaggaccttcccagcaaagatacctttcccctgtctgctgtatggccacagagtcaaaatgttaatatgtttgtttctgctttttatttaaaaatttttaaattatggaatttttcaaacatgaacaaaaatagatggaatagtgtaacagcccctgtgtacccatcccccagtcttcgcagttactcacttgttattactcttgctttgctgagcctgttacactctctgctttgttttttgcttaacaacttacagcaagtcctagatgttacatcagctataaatacttgcttatatatgaatctcttacagtaagacaaaaaaattatcaccacacacacactattacacaataaaattagcaacagtctcttaatatctaagttcaaagttccttgatggtcgtttacagtggctttgtttgagtgggttctgattttacttttcaaagtgttaagtcagctcatgccattcttatgtgtacaacactccactgtactcagaaaaaaaagaatatccacccttctttccctggcctgcatgttctgcgtgatctgaccggggcctgcctgcttcctgttaagcatcttcactgtttgttctgcccgggactcgtaccccacagatcttcagatctttgcaggacggtttcttttcaattcctctgaagagagggtggtcctccacctcagtcatttcccctcctcattatggttttacattttctcacacaacctactcttctacatttatttgtgtttttttgtttgtttgtttgttttgttttttgagacagagcctcactctgacacccaggctggagtgcagtggcacgatctcgtctcactgcaacctctgcctcccgggttcaagtgattctcctgcctcagcctcctgtgtagctgggattacaggtgcacatcaccatgcctggccaatttttgtatttttagtagagatgaagttttgcctgttggccagactagtctgaaactcctgacctcaggtgatcctgaggccgaggcaggcagattgcttgagctcaggagtttgagaccagcctgggcaatgtggtgaaaccgcatctctacaaaaaatataaagaaattagctaggtgtggtggtatgcgcctgtagtcacggctactttggaggctgaggtgggaagattgcttgggcccgcgaggtgaaggttgcagtaagctgagactgtgccgttgcactccagcctgggcagcaaagcaagaccctatcttaaaaaaaaaatgcatgcaataatacacatgaaaagattcacatcgtagaatctttggtttctgtgatacttttctgttaagaggtggtaccaagcacatgttggaattattacctcccacatccagaccaggtaactggtttacagattgggaagatgggacacctgcagatggtcatttcaaggtttggcctcagatgggcatgtggggagcaggagacagtgtggcttcatggaaactgccctgggctttgcattggggtctttggaaaccctgccctatcttagctctgtaacctggaacgcgttgctttccttctctgaaccccagattcacccatcaaatggggcaaaccaccatcttcaaaccagtgagagacacggtgtttctgaggctctttccattttcctgcagaaaaagactgacctgtactagtagcaactttgctgaccagtcaggctgagagatgaacgcagtacatacaccacaggtccctggaacagatgccactaattcattattgacaaaacataatagctctattattttttacattttccgggtgttttctgaacaccagtaatggttctgtctcacataggtcagctaagttaatcgtcgtggttgccagtgagcaaggtccttttgtgttctcagttcacaagagggtgacaggctaagaagcttgctcaggaccccgcacacagtggcagggctggaatttgaatgcagactctgctagaacgtcccctgccatccatccatcatggtcattagggtggtttttatacttggtgattgtcagagtgtctctgtagtcgtgtctattactatagctttcttttgtgccccagccttggctgtttttagtcaaggataataattgtttaaaaagagctgggcactgtggctcatgcctataatcccattgctttgggaggccaaggcaggaagatcgcttgagcccaggagttcgaggttgcagtgagctgtgattgtgccactgcactccagcctgggcaacagagcaagaccctgtctctgaatgaatgaatggcacatcctttatttttagctgtacagagggtcatgacatcttccaaaatatcgtctaattcagagccttccatgttggtacccactctggatctcttggccggtcttgtgtacagtctggaggcccctggggagatccccccatgttttttctttctctcacgctccctctgaatctttgtctcaaaaaaaaaaacaaaaaacaaaaaacaaaaaaccaaacctctggctctgttgcccaggctggagtgcagtggcatgacctcacctcactgcagcctctgcctcctgggttcaagacattctcctgcctcagcctcccaagtagctgggattacaggcgtgcaccaccacacctggctaatttttttttttttttttagtagagatggggtttcaggatgttgctcaggctggtctcgaactcatggcctgaagtgatccatccatctcagcctcccaaagtgctgggattatgggagtgaaccactgtgcacagccactcctcctaatctttatggtgagctttttgaatgcagctttttccagaaagttttatgtagcaagccggtgtgacaggaagacaaattgttgagctttaaattgaagaaaaacagaaggcagtttgtctgatgtgttccagttctgttcttctaccttcttcaagtttgaattatggagacggtgtcctcccgctttgaaagttaaactgctgggaggtattttattggggaatgttctattaaagcattaagaacaattagatgtaaagtcctcttttatttttatggagtttgacatacaaataattagaagtttgggttttccctctctccctaccttccttctctttccttctccctccccaccgaccccacctcttttttccctttcttccttaagggaattctaaaaccctggaatgaagtgcattttgggaagaatttggtagcaggctttctgtaattgcccacagaaggagaaaaaacacatttacctatttttagaggtgaaaactgctcctccaggcttgagggcttttctagggcaggctgtcccccgttctgagaccccccacagtgggagctggcttccctctcccctctgacacccctgaggtggaagcaggctgttttttttggagattctggcaggcttttctacctgtcacagcactggctgtggttcctaattacatacgtgtgtgtctgattagggtctgtcgcccctattagactcagaatcccatgagaaagggtgttctggcatttcccccgtctccaactcttcatcctcaggcctgaactctgtctttcacccacagcaggtgaccggcaggtgccttagtccatccgggctactataacaaaacaaaaagtaccagaaactgggtggcttataaacaacaaatagatctctcatggttgtggaggctggaagtccaagatcaaggtgccagcagatgtggtatctggggagggcctgtttgctggttcatagatggcaccttctccctgtgtccttacatggtggaagaggtgaggctgctctctggggcctctcttacaaaggcacgaatcccattcataaagggctccaccctcataaccataggctctttaaaatgccgcacctcctaatatcatcatcttggaggttagcatttcagcatatgaatttggcagtggggagaggacacaaacattgagaccacagtagcaagcatttaggcatgaagaatgtcacgggaacaaggcttggcttctcattctgcctcccaccccccttgcccttctgccagtggctgcctctgctggatgccttgttctggacttcttgcttgtcctgcccccgttggttgccccaccaccccttccgcgcccaggggactctggctcttgttgctactctgcagaccaggagagaaaactccatcccaggaggaaatgtatttggttagaaggtttgtaacaatgtaattatgcagctgagtgtgctcaggtatattctatgtattaagctgatagaaaaatcctgtgttaagtcggtggattcagaagaacaggcgcaatttagcaagccactgggaggagcagctcacgtgaagagccacagaatgtttctcttcttgagagcacggggatgaggtgagccagggacatggtcattaacaagtggaggaggggatttggcttggttaaaggaccctggactctttccattgcctcagttacaggccgttttctcagggcaatgatgttttcattagaaaagccacagacacactgagccaactataactggggaccaaatgagaggccgcttttctatgctagctgcctcttgagggcagactgtggagttggagatgcgtttgagtagagggtggtggcatgccgagatggaaaatgaaaggggtagatgcagctgggagtgtgagagcagggagggcccagaaccttctgcagttcatcctcctggagagtctacaaccaccatgggttcactaagtgatcgtgagtcccagggcctgtcttgttccagtgacactgctgcaaggaagggtcccatgctagagatggctgggcccatcctcatgagatcactcctctgctcaagatcctgcagtggctccccacttccttcgaagtaaagccaaagctggtgagtggtataaaaggacttgacatgatgcagtgctcccatcatctctctctgctcctccgactcctcctcgtgttcatctgctctgggcatattggtctctttgctgttccttaacgtgcgtggcgcacacccccccacatctccttgaagccttggctctaacgtttctctctaccaagaccctcttcccccagagagcttcttggttaactcccttgtctctttctaatctattttattttatttttgagatggagtcttgctctgtcgcccaggctggagtgcagaggcgcgatcttggctcactgcaacctctgcctcccagattcaagcgattctcctgcctcagtctcctgagtagctgggactacaggcacccaccaccacacccggtgaatttttgtatgtttggtagagatggtgttttgccatgttggccaggatggtctcatcctgacctcaggtgatccgcccacctcagcctcccaaagtactgggattacaggcgtgagccttgttggcccagccctcttggagtcttaggaaggggcgcaggttgcctgggtttccctccttgcctcttcctgcccccagagagcaccatgaagcccaatgaaggtggatatggggcaggagctcgctggggctctggtgtgcaggaaggtttccctgtttgtcttcaaaactgattttgtaagtgctgagagccgtgttttgtttctctacctctatggcctcatctgcaaggcaggcctctctaggtccttagcaaatggctgtccagccgacttggccaaatgaatgaattgattctcagggctgtctgtttatccaacgtcaggagaatgggagtgcaggagcccagggcatggtccctctgggcactgagtttcctcgtgcccccctcccctggagctcgggtgtgtgtagatgcatgaccaaggaccagggggcattttcacttctgtggggtgggcctgccgggtggctgggcagggaggcccctgttttagtcgtgtttctcctgggagcagagcctgtgtcaggggcttggatttaggtgcttctctgggagctgatcctaggaagctacagtgagggagccggagggtgagaagggaaggaacggcagtcaggaaaggggatttcttgagatggctgcaggtgggcagccggagagtcccccgaggagtgtggagaacatgcctcgcagtcgcctcggaaggatggggcattcatccaccaacatccaccccccataggctgatggttgtcccctcaaggtgctggctgtctccaccctgcttccacactatccagcagggctggtccccttctctggctctggagaaggtcctgagggcagcacagggcagacctcatggttatggaggtgggagtgagtaggcgatgtgcacacactggccctccacagcatgagggcgagaggtgagccgagggcaggggacgtggggtcatgatgtctcctaaaggaacttctcttattgcccagggcgggaggtttcacagcagccgtttcctgggtgtcctgctctcccagagtgctctgcagtattatccttttacctcaggccactgtgtagcaccatgtaaagggtcttatgcctttacattgacacgattggagcctttgaaacgtggttatgaagcaggcttgattttctgcatttttcagatgaaaaagcagagactggaggtttcctatcttggtcaagttcatgtgagctcgtaagtgaagaatccaggaactgaattcctgtccctgaccccaaattccttgctgggagggcttgagtggtgccctattccctacactatgaagtggagacagtgtgcagggccattctctgaaagccctttgtgcctctgggcctttgcatgtgcttgtctccgtctgcccgagggctggcttctgttcatgcatcaggagccagctgcagtgtcaccacctctgtgaaggcgccgtgattccctccagtgcttcatcctttgtgttttcccagcatcccagacttgtattataattcacattacatcacagcatctggtataagttctcaggtgctaggtacagtgaccaactccagctgaccgtgcatgagttaaagcgttgctgctgcttttttttttttagagacagttctcactctgttgcccaggcttgattgcagtggcgccatcatggctcactgcagcctctacctcccaggtagagcacttttaatttttttaatttttttatttttattttttgagagagggtctcgctctggcacccaggctggagtgcagtggcgcaatctcggcttactgcaatctccgcctccagggttcaagtaattctcctgcctcagcctgccgagtagctgggattacagacgtgcgccaccacacccggctaatttttgtatttttagtagagatgagggttcaccatgttggccaggctggtctcgaactcctgacctcaagtgatccacccacctcggcctcccaaagtgctgggataacaggcgtgagccagtgcacccagccggttttaattgtcacagatgtgggcacccagtagtcctgcttgagcattctcacatattttgtggtccatttgcctaatgattcataagtgcctcacaggccaagctcacattagttcttttcttgaacattgatatgatgcctcacccaggctgtgggccaaaaggacagcgtggcatgatgaaaagaacatgcaacgtgcaccggagactcggggtagcccgagtggaaccctgctccctcatttcctgccgtgtgacctcaggcaactttgagcctgtttccttatttgtgaaatgcggatatggggattgagtgaaatgggggaacccttagctcagtgcttgtctgtttaagtattgacttctgtcccactttctctagttagtgcccagtaaattgttgacttgatctcaactcagaacgaggatctttgcctgtggcgtggaatcatttctccaatcatggagaatgggcggagaatgagatttgtaacacacctgcctgttagttttagatgagcccttctggaattaatatggtgtaggcttgggtagaaagcacatcttgtgcataactgcattatcttagcaattagctggaatgaaggttccatgtgccctctactgaggacacccgtctaacaaagggtttctttggctcccagcaaggctggcacccctgcagatgtatgacgatacccagccaagttgatctctctgcctaatccctagttccagggatagcctgtggagcattgtagggagttggcttcattcctcacccttccattctttcagagacgatggctcagcacactgtatgttgggctgcttctcaagaactaattcccagtaactagcaatcccagtattgagtagatgcaagatgattttgagaactctcgctgttctgtttctaggcttcaacttcggatatcttggaccaggcgtttctccctaaagcttttgctgaagtttcaccaaaggattttatgagactgtaggttccatggaccacatctgcatagagacatggctgtgtatttcacaagtaggagaatagaaatccccactggggctgggcacggtagctcacacctgtaatcctaacactttggggagccgaagcaggagaatcacttgagcccagaagtttgagaccagcctgggcaacataaggagaccctgtctctattaaaaataagtacatttagaaataaaaatataaaaaggaaaggaaatccccagtaggactgggagaactcatacctcatgggtagtgggctcagtggccttggtgaacacttaagagagggacaggaagtacaaggtcctttgctgctactcccttatcccgtgcttttgcagacattactaatcaatcactgcactctttgtagccctagaatcttagaatccagtgcatctaggcagccacttccagtcataggcaccaattttctttactgaaaatctattcttcacctctcttgtctctgggaactctaagtaagtccctttccaaaagcgcaggctagtcagatgtctctaacaaatggttctagggccaagtgggaatgatgagatttgccacagcagggaatagcaccgtgactctgatgttgccaggtgtggaaatgatgctggtgaggcctgggtggtggtctggatgcccactgtttgccccattgctgggtctgctggaccccacgaactgcctccactccactttctgactgtattcatgttgctgaggggcgtcagggggcatggtaggagtagatgttaggtttttaacatgaggaatcttcattttagtttagattcaggatctttcagccctctgagtctatccccttggttacatagcagagaggcttatgtgctctgccaattagcccaccaactttagaaggtcacagccagaaaaatagtcttgtgctaatgatttaaaaataacttggtgttattatatcattccattcctgtgaaacatctaggataagcaaatttctagagacagaaacgagattagtggttgtcaggggccgtggttggggtgtgggtggttgggagtgactgctaatggatataggttttctttttggggtgatgaaaatgatctcttcatagaattgttgttgttgttgtacagtcttgcaaatatgctaaaaaccactggacatgcactttaaaagggtgaattatatcttaaggaagattagaaaaaagtaaggagattttgtacaaaataaaatcaagtgttaataacagctactactgagcacttaaaaacgtaacttcatggcagaagtgttagtgctgtcccccatttcttgatggcattatagcatcaatgtctggactgtgggagctttctcttttgggtctgaaatattgagatcttgactgctttcacttctggccttgtgccgggagtagcgactgtatgtgtgatttcgagatatgcaaatcatcctcttcttgctttcctgatttttctcaggattgctgacatgctacagctgatcaaaacccacacccgagtacatttttgacagagatacagtgatgatttcatctttcattttcacctccctctatcagtcccgcaatgatttccagtgtctgatacctcgtcacgttctgcggttgataatactatctcaattcatggcccttgaagccatgttgaccacctttctgacctttggatagacagggaataccagatgggctgcgttttcccctcggattttctttccagccttttccctttccactctcttctttgccccgaggcgcagcttggtggactccatcacgaggttccccgacctctgacttatggttggctttggcccatgtggtcactgggaagctctgccaggaatgacttgaggctggggcagttactctctcgtcttcctctctgctggaggctgcagcttctttaagtggcatggcatcactgcccaattgatgctgggctccagtagccactgtctaccttacccttcaggcctgaaggagcgtagggtgggcatctgatacggtttggatgtttgttccctccaaatcttacgttaaaatgtgattcctaatgtcagaggtggtgtctgatgggaagtattgggtcacggggacaggtgggtccctcatgaatggcttagcacactcccccttggtcatgagtgagttcttgctctattagttaatgccagaactggttacttaaaaagagcctggcacttccaccctccctgcccgcccttcttctcttgcctgtggcacgccagttccctatgccttctgccatgactgaaagctttctgaggcttcactagaagcaggtgctggaccgcgtttcttacacagtctgcagaactgtgaaccaaatagacctcccttccatataaattacccagcctcaggtattcctgatgagcaatgcaaaatggactaatacagtctttccacaattgtcggcccccgaatccctcaccacccctgttggtttcttttcaccttgctcctctgtaaatggtctattaaacctcaccatcaacccctttgatggtgccatgtacttacttcctgccgggctttgactgaaacaccaggcttgttccaactggatggctttgcacgtgatggctcccttcttgaacactcttccctcagatctcagcacggtcggctccttctgagggtgtccagcctcagcacacatgtcagcgcctccgaggggcctcgtctgtttaccctctcatcgtccatcctagtaccatgcgtcattttctttatatcactttgaccctctgaaatgatcaatacttggttggctgactgggcttgtccagggcatccacaccctcctaagtagatgaggagttggcaaatatattctgttgaggggcagagggtaaatatttttggctttgcaggccatatggtctctgtcacaactactgaagtctgctgttgtagcaagaaagctgccagagacattacataaatgagtggacatgcctgtgttccactaaaacttcattcacagaaacagagcagaaatgtgtggtaggcacattctattcaataaagctatttaagaagccacaaaaaatacacaacaggctggatttgtcctgtgggccatagttgatgaccttgagctagcctgaaggcagtggggtcttgtgtgtcctgttcactttgggtccagtgctttgaacggggcctggctcgtaggaggtgcgtagtaactgttccctgaatgcagacccaggaatgcctgttccatgcaggtcatggtgctgggcagcggcaacaccctggagggccggcaagcacgtgtttatcacacaacatagttgttgctttgtttttcttttttttttgagacagtctcactctgttgccaaagctagagtgcagtggtacgctcttggctcactgcaacctccgcctccagggtttaagtgattctctcacctcagcctcccaagtagctggggctacaggcatgtaccaccatgcccagctaatttttgtatttttagtagagatggggtttcaccatgttggccaggctggtctcgaactcctgacctcaggtgatacgcccaccttggcctcccaaagtcctgggattacaggcgtgagccactgcgtctggccagttgttgcttctgatggtagataggaatgtcctttgcggagcccccagggtgaattgggtcaccctgctgagaaaggcgggactggcctccctgaggagggaacactggagctgcgtctggaaggctgattaggggtttggcaggtgggtgaggtggggtagcagggaggagggctttacgagaagcttgagagggcctggtgtgtttgacggactagactctgctacccagggtgttgagggtgactggagaggagctcaagtggacagaggccagaccagaggcctgcacaccatgcctggtggtgggtcattatcctctaggcgatggagcagcactgaggatgcagcaccgatgaattcacatggttagagaggcgtttccattgagagcagtgtggagagtcatggaggggctggtggcaacaggagactagaaatctcctgtagaagcttccctctatagaagcttcttgccccacatgggtcttggtctagggtggggtcttgggaggatttgtatttgttaaaccgaaccttttgttcagccagggctgaggactgttccctgcctcggcacatcctgcggtctctgttggagagaacggaccataagctgatgcaggctctgtttctggcttgctcgatggtggtactgttccgtggtgcagaggatgagcaggtgtaggtgaggagagggtgtgtccagatttggacattctacaggagtggggtggggagaactgagatgttaacaagtaattgaaaaatgaggtcacaggtagtacagctctcaagaagacagtacaagatgatgatgtgaatctgcaaaggacctatggagtgggaatatcttttggttgggagggtttgctttcttagttggggaaagcattttggaggtgcggtgtgtgtgtaggggcacaaaggagccaagactggaaggatgaggaggaaccagctctcccagtgtctgggggaagacagggaagggcatatgcaaaggccctggggtagggatgagtgtggggtatggaagaaatgtcaagaggggcgcagagcagaatgtgagagggcaatgaggtacgaaataaggcatttgagtggagtttggaaaacagaatttccagttgaccaagatttctggttaatagagtactagttatgctggtttaagaaaacccgtgcgatagtgaatgactgtaataaggatttataagatgtacttgggaatccttgatcctgtaggttcgtgattttgagaagttcaactgctacatttttgcccctggcctagcattacaaccttgagaagattgagtactgtttacaagtatgtacttttttggttgataatatttcttgaaacttctcactttgaaaggggccatacagcatttggaagctgtatgggcagcctgagcatttggcttggatttaatcatgggattttcttactttgggcagcagaattcatataagtgtgtttattcatgcctttttttttttttttttttttgagatgaagttttttggctcttgttgtccaggctggagtgcggtggtatgatcttagctcactgcaacatccgcctcccgggttcaagcagctctcctgcctcagcctcctgagtagctgggattacaggtgcccaccaccatgcccagctaatttttgtatttttagtagagacagggttttaccatgtttgtcaggctggtcttgaactcctgacctcaggtgatctgcccaccttgatctcccaaagtgctggggttacaggtgtgagccaccgcacccggccttattcatgcctttttgactcacttctcctgtggctgttcttgaatttgcatttgccatcatgtgagtgaatcaagagtttgtcgtgttcggccttttgaggaacaggataaggaccacttagcagaacttttggagacatactggcatcttattaagtgggaaatacatggtttcacatggaagtgagtataaatcgagtaggcctgtgtttttgctttggaatctctgttgctcatgtgtttcctgcgtaattgtcctgaagaagagaggagcttgagtgacatgcattctgcaaacatcttgctcccttttgcagtgtgctttctagttattatgtggtgcatatacagcttgtgaagttgttcagcaatttagtggcataaaaagataacctgcttgtcaatttttgtctcaggtcaagtcacttatgcctaagaaaagatgaaaaatgatacatgtaggcaaaatagtcaatcctttagtttgagtctgtatcagctaaacattttttgtaagcctccttttacaggtttgttttttaccattcaaatattaaatataaactttacttatttttattttatattttgagacagagtcttgctctgtcacccagactggagtgcagtgttgcaatcttggcccactgcaacctctgcctcccaggttcaagcagttcttctgcctcagcctcccgagtagctgggattacaggcgcacgccgccaccatgcctggcaaatttttgtgtgttcagtggagacggtgttttgccatgttgtccaggttggtctcgaactcctggcctcaactgatccacctgcctcggcctcccaaagtgttgggattactggcgtgagccaccacacccggccagactttgattcccttctgactgatgagagtcagccagctctgctgcacactagccatgtgaccttggatctaccacctcacctctctaggccgtgtttgaccctgtctaatggggctaccttagggggttgtcgagagttgtttgaagtccttatcctggtgtttaatgcatggaagcatttaatccatgtcatctattcatggtagtagtattaacagtagtagtcattgccgttatcgtaataatagtagcagcagtcttggttaaaaatgtgatttggtggtttgccaaagtggatacattaattcattgatgaaacaaacatttattgagcatctcctgtgtgtcaggcactgagcaaaatacttgggatacagagataagtgggtagggctcttgtggaagagcagccaggcaaatgggagagacaaatgagggggccatgatgggcattcagagcagtgagcgctggaagcaaattaaacagagggtggtttgggagcacagaggaagaaatctatccatgggctgtggtcaggcaaggctgagccttgaaactggagggctagccaggttaacatggtgaaggaagggctctccacttggaggagctggcgagcaggaaggcggggggcataggcagccgagtcttgtagtgtgcaggggagcgtggcgctcagttcacttggagctgattatggtattgggccatttccttaccagagcctttccccacctacttctcaggtggctggaccaagaaggatatgaattgttatgtagacacagctcctggaaaacccaaagatcccgtgtacccaccctcctttagaggccccgtatttatttgtttgatgattgccaccagcagcttcaggcatcagagttgggtgtgtgtggctgttgaaaaccaggaagtcatgatccactttcattcagtgcttccagcagatctcgtgtccaacttaatattgtgaatttaataactgttggtttgtttggactatttatatgcttattttgcaaagcaaaactcaagccctactaggaagaagaaaatgctccgtctttgctttgggttgctgcatggagctctccttacgtggatcagccagtggttaaggaaggtggtaaactggggactttctgttacagtcttccacatggcccatttgctcaatgcatgtcttttttgcttccaaaggaattttgactttgtggggcatgctatgatgaagtcttggctttgctggctgaaccgagtatattgccttcctggccatctcatagctggtgaggtcgttcttcccatttggaaactgttttttctttgtttccctcatgagaagtctggttccagtggcctatgactgcaccagctggttgtctggcccagagctggagtcacctgatggtccttgtctgagctctgccgccgatgcagatgaggttgcagagaggtggctgtgggggccacctgtctggccctccagactgtccaggtgtcagatgtcacagagcctctgtgggtccaggtagagctcttgatatttcttgttccttccctgagctcacctggttgcccttctttttgtcagggttgacttctccacccaccaccaccaccatcatcaatatgatcatcatcatagtagccaccattaattgcccagggttgggaggtgcaatcattgattccattatcgccaccattaagtaatgatgattatgatgactgcagctcacatttattgagtgtttagtgtgtttcagacattcttttaatcctcccaatgaggtaggtagaagtaccactgccctcttagagatgtgggaccaaggcacaaagaagtcatcacttgttgaaggtaacaagccggggagtgaatgagccaggatccagtttcagtgtgattctacatcaggggttggcaaactgtcacctgcagggccaccgtttatttcgtgaataaggtgttattgtaacccatttgtttaggaatggtccttggcagcttgcatgtggcagcagcagaggtgagtagttacaaaggagactgcgtggctcacaggcctgaccctttaccaaaagagctcacctggcaccctgttctggaacccaagctctcagccagcacgctgcgctggctctcaaggaaagacaaaatcaccaggtttccacagtgtcccaggcactgggagacagtcatgaagtggcgtattctggtgaggaggcagacagtaatgatatactcactttagtacaaagagagaattgctctgaaggaaaagtgtaggctgtcaagaaagcagcaaacacaggcagcgagtgcttgcatgtctatgctggagggcggggatccaggcagtttcgctggtggaagtgacatttgagcagatgagggtggagggaggagcctttgggggaaggaaaggatgtgcaaaagcccagaagtgagcaaccatgacctagaggaaagcgtgattcccctttgcatgtgaggaaactggaagcttaaggaacccttgtcacgggtcacatggcaagctgaatggttgctcagagaatcgaaccaactttgtttgaatctaagccccatgttgttgctcctattctaggttcctctgctcctaggtccccacctcgttacatacctcgccccagctagcatcttcccataactgaacaggctgacgggtgccctcgtgaccttggaatgtgccttggccgtagcacaggggcattggcgtggtttctggagccagcctactgtacattcctggtttttccctttgcttcatctctcatcacacagaggcgcttcagccacatttctggttcacctttgctgctagaatcttcttaacaataacgtattgagttattattagatcgttacataaatttctatcaacgcattctggtagatttgccctctagagagctccttcaggagaaaagctcttagaagagtgatgtgagggagtgagttctttgcatgccggtttcttcttgccccagatcatccggagagagggcagaaccttggcacctgggttgtggggtgaggagggtggtggtccccttctgacctgcacgtgctggggagagcttttaccagaaagggttttccgtcacagctgaaggatggctttggaggtgatctcaagacttggcctcactgctgaggggtgtgaggtttcttgtgcaggtgatgcagtgttctacgataacattgtcgggatagctgcacagctctgtgaatatgctgaaaaccactgaatcgtatgcttgaactgggtgaattgtttggtatgtgaattgtatctcacagctgttcttttaagaaggagaagcctgacaaagcttcagggaggctgtccgggagccccagttctagggagggtgccctgtaggctcaaagcgcaagtgacgccgcctggtttgttcatggccccgtgaggctgtgacactgaaacaagccaaaatgtagctctcgtgggtgggagctgatcacgggcttccttttcagaaatgaccccaggaggccatgtgggtcttgtcagtgggcacggacttggctggagggcctgggctggggatggtcctttgccgcctactgccttggtgaagtggctttgtcttcgggcaaggcaacatggacgtactgtgtgaacaggaggggatggcagacatttaaaatgcattcatggccaggcgttgtggctcacgcctgtaatcccagcactctgggaggccaagatgggtggatcacctgaggtcagtagttcgagaccagcctggccaacatggtgaaatgctatctgtactaaaaatacaaaaaattagccgggaatggttgtgtgtgcctgtaatgccagctactttgggaggctgaggcaggagaatcacttgaaccccagaggcggaggttgcagtgagctgagatcatgccactgcactccagcctggggaccatccagggttcaacagccgcctcctgggttcaagtgattatcctgcctcggcctcccaaagtgctgggattacaggggtgagccaccgtacctggccacattcatttattaaatattggtgctgcaggaaatggtaaagaaggtggataagaagctcaagttctagatcgggtttcttgctctccgtgccgacacttgggctggataatcctttgtagtgggggctgtcctgtgcacctctgacttctagatgccaggagtgctcctcccttccccgttatgagaactaaagaagtctccagatgttgcccagtgtcccctggggttgaaattgccccagttgagaagcctggctctagatggtgggggcagatcctgtggcggaggagccatggagaacacatggtgtgagagtggcagcgcatgtgatggtgtgtgggtgacagggagcgggttccttagtgaatctcagtgaacgtgtgtatgtgagctggcgactggggaggccgtgtagcgtttgtggcagttgagagcactggatccagacccatggagcaaagccagctctgggtctcctctgttacgtgggggagaccacttagccctgaggtcatcagtgggggaggcgtgtggatgggtgtgcctgcctgctggtatgcgtgtatcagaacagagaggaaaagctcaggcagaaggaggagggtagatgggctgttcgtggggctgtgggggtggagaagaatgctctgacatgggacggaggcttctgggacttctcacggattggttacagagggagctgtggagggcgacagccaggattctggtttaagtggctgagtgggtggtagacacggtcccagagaaggggttctgtgggagaggaggctgtgtgagtgagtgagtgtgtgtgtgtgagaggagtgtgagtgtgtgtgtgagagtgagagcacgtgtgtgtgtatggggtgtgtgactaaggagtatgagagtgtgagtgtatgaggagtgtctgtgcgcgcgcgcgtgctgtttacagggcctccgagacatcccggaggccctgatggctggagagagagccgtaggatttactgacgacctggagcccaggagaaaaatcccggccagcgtgtttagggtgttaggggcgcagcgtgattttacatatcttagatcacatagcagcttggaggagagcttggagggacctttcactaggcccggtgcttgtttgcggtctataattccttctctagctcctcatggaccctgtgggacagcctcaccctcctgcctggttgacacgggctctttgagagctgagaggttcctactgacctgtattattcctgctgctaattggaggttttagaaagctgcccacactatcttcacgtgatgactaagagcgccaaatggaacccaggtctggggtctgccgttgcatccctaaacctttctgaaaaggcttactttttttttttgaagggagggagggagaaaacacgcacagttagtcccatcttttggatcatcctgagtcagatagcagcaaatgtgtggttttgaagtcataccagagcatgggctttttcagcagaagattctcacgttttgagcctgtgcttcagagggagggctctagggagggcaggaggtctgctgagcacccagctctggctgtagctgtgttccacaggccgtgggtgggtttctgcctttacagtggagaggctggttcagggcttagccctcttctggggtagcgttgccctccctggggaaccttggcaagtgccaagagccacaggcagcccagatttcaggacagggaactgaagagtagatggatttctcctgaccgaaaggatagggaggccttagcttgggcattgtacagtatttgcttgcgttcctgtttcactaatgattgttatatgtactcagcctctaatgtcttgtggtgtggtggtatggcccaattgttagatttggtagaagacctagttttgatcatcagttctgctgctttctggctgtgcactgtcaggcaattccctgacctctctgggccccagtgtccagtgaatcccaagcctcacaggacattgacgaggatgcggtgagaattctgagattgccagcagacatccccgctgctgcttattagtggtggtgttctacgttaccacttatttttctaaattacaccaaaagctttgagtctttattctggaagtgttactctctgttttagcagtgtttttatagacttaacaacatgaagtgttgcctaagaatgaaatgcaaatcggtacctggtggctctcattgtggctttgcttgtcagctgagaagtaggccacgtatgtttctgaaaaggaagatggcaaactcttcttgggaattcaagatgggaagaaaaagaagggaggaggaaaggggcgaggctggagggaaaaggtggagacaggccagagggtggcaaggtgtcagtgcagggctgagatctgtcattttactcttctgctgggtggtacctccaatatctctgagtcccccagggccaggaagagaagaggatgctggatggaggaaaagcttgggtgggatcccacctctaccatctggcagaggggtcatcttggtcaccatccttcacctctccttcacctcaccatcattcacctctctggatctcagtgttctcatctataaaatgggtttataatattctcttcctttcagcaatgttgaaggattaaatgaaatcaggcaaggtgcttagaatactgcctgacagatattaagggctcaaagaattgtcattgtcattaacatgatattatgataaacggacttgacttttataatccctcgagataggaaggacagatgatcatgccattctcgatttaagggacatgggcactgagattcaaagaggtaaagtaatggatgtgaagtggcacacagggcaggggtcagtcagtgttctatgtgaagatgggaaatactttcagctttgtgggccgtatggtcttcgtcgcagctgctcaactctgccattgtagtgtgaaagcagtgttgaagtcaggtgaaatatggagatgaatctacatttaaaacgtttatttgggaagcaagaattggaattcagggtgtacacacagaccaggtggtctctggtaggtccaaagaacaaagagagggttggaggttttctaaacaggaaaaatgttccacattgctctgcaaggaagtcaattggcgccggtaagttctgtggaaccgacaacctctgattggtgagtgactgccggagataaagctggtcttagaattgcagccagtttcagtagctattagataaaagtgggttctggttccaacaggcggttccaacagccaggcttgcagagagttacattcgtggagcaatgttatattccctgagtgcttttccctactggccacttgactctgttttagttgggtgtgacaagaatgacccagtttgtgtgatcagctttcacaagcaggcacagatactgtatgctctaatggcatgcctgtgtttcaataaaactttatttacaaaaaacagatgctggctgggtttggcctgtgggctctagtttttgaccccctgacttcagtgcccaagtgctgagtgaggtcttgaatctgtatcttttggctccaaattctagctctctctcattctgtcatgtagcttcctctacgtcccaatcaggagaagcttatatctgttaaccaggagccaaacaccttctgcttctggagccaatgctaatgtttgggagaagggaaggcttcattttccaacctctgtgatgcctgcagagatgtttccttgcttataacttaatgcgatttgatccccttgacttttggatgggtgctgctgcccctctgcttcttatttatttatttagagacagagtctcactctgttgcccaggctggagtgcagtggtgcgatctcagctcactctgcctcccggcttcaagcaattttcctgcctcagcctcctaagtaactgggattacaagtatgccccaccatgctgggctaatttttgtatttttagtagagatggggtttcaccatactggccaggctggtttcgaaatcttgaccttaagtggtcccccccaaccttggcctcccaaagtgttgggattacagacatgagccactgcccccggccccctgtgcttcttattagtggttctgcagaagcaagtctgaataacccaaggtcattattgggaactgcatgttcctgttaactccccctctagagggcagatagatgcttccctggtgcactactggtattacagagcagtgtctcctgggacatgtagctagagcgtctcccctgtgcttctgagctgtaggaattatgatgtgggaagtttggtgcagtgaaactcatcaagagagcaggtggtgggtacacagttagcctagtgacctctttgactgcagaaactcagggcaagaagacagtggtcccatcttggcaagatacatcgtttgagattttcagccttgacctctgcccaaaggaaagggcgagagaatctagctgttgctgcccatttgagctctgggcagatgggaggtagggagatttatcatgggattttggccaactctgcagcggcattagctcctttgttgacccaagctgggctggaagaggaattaacaatgacagacaaaccaacctcttgtggcgttcaccagttttcaaggcagcatttgagccagcacaaaagaattctcaaagcttgttcaagggaataggtttattttccacgtgataatgctgttggtgctttataaatgatgaacaataaaaagattaggaggttatcaaatgacatggatgtgggatctgtgccatgtggcttgtttgaaagttgctaagctctcccctcctcttagtaataaacagcatgttgaaggaggttttatgtttggcatttttgctctttggatttttagggggaagaaagtggtcctataaatggaaagtattattactattaaaaaaaaaacaaccaattatcttgtccctgaggtaagagggctagtaaacagcttagtgtcctctcctgagaggtctcacaagcaatgctaattatatttcatttactgcttaggtggcttctaaagggagattgacttgggaataattatttggggattattctgtttttagggtttatgttcagggattatctaaatttttactgatctattactaggttgcatttttataaacttcctctattataaatttgtagcaggcaaatttggcccctggccagaagtgggtcactcttggtcatggagtgaattatgtccgcctaccccccgaatatatatgttaagccctaactcccaatgtgattgtatctggagatagggcttttaaggatgtaattgaagtgaaatgaggtcataagtggggggctggccgggcatggtggatcatgcctttgggagaccatggcaggtggatcacttgaggtcaggagttcgagcccagcctggccaaaaagatgaaaccccttctctgctaaaaatacaaaacaaacaaacaaacaaacaaaaaattagccagggatggtggtacacacctgtaatcccagctacttgagaggtagaggcacaagaatctcttgaacctgggaggcagaggtttcagtgagccgagatggtgcccctgcactccggcctgggtggacacagcaagactccgtctcaaaaaaaaaaaaaaagtacggggctgtaatacgataggaccgatacccttataagaagaggggaggttgggtgtggtataatagctcacacccataatcccagcactttgggaggctgaggcaggaggatcacttgaggatctcttggagtttgagactagcttgggacacataggaagaccatgtttctacaaaaataattaaaaaaaaaattagccatggactacccttgtagtcctagctacttggaaggctgaggcagggagattgcttgagcccagaagttggaggttacagtgagctatgattgtgtcattgcggtccagcctgggcaatagagcaagaccttgtctaaaacaacaacaacaacaacaaaacaaagaagaaaaatgatatcaggggacacactggcagagagaagatcatgtgaggagtggggggaaaaggcagccatctacaaatcaaggagagagacctcagaagaaaccaactctgccaacacctcagtgttagacttccagcctccagaactgtgagaaatacatttctgtggtttcaactgcccagtctctggtattttgttatggcagccctggcagactgatagacattagtgatgtctcttctcccagcttttgacaggtgcaggttcaaatcttggttctgctgcttagcagcttgagtctttagacaagctgataacctttccgtgccccggtttccatttatgtgaaatgggaatagtgaatgttccagaaactatgtctagtcagtcctcagtatctgtgggttttacatccatagattcaaccaactgcagattgaaaatattcaggaagaacatacaaaatatcaatacaataatagaaaacaacacaaataaaaatccaaaatagtataccaattatttatatagcatttgcattatattaggtattataagtaatctagaggtgatttaaagtctaccgggggatgtgtttaggctatttacaaatactgtgccatttcatataagggacttgagcacccttggactgtggtatgtgaggtgggtcctggagccaataccccatggataccaaaggatgtgtctgtgtgttgttttagtgtgaattgtgaaagagattggctacatctgagtgttgctatcaaatgttgattctcatttgttctcagtgatttgaatttgacaacctggggatacacattttactagggtttatgactgaggcagtgtggtgtgggggaaaatttgcaggtcctggggtcgggctgttcagggtttttttttgtttctgttttttgttttctgtgatggagtctcaatttgtcatccaggctggagtgtagtggctcaatcatagcttactgtagcttccaactcctgggatcaagcaatcctcctacctcagcctcctgaatagcagagactagaggtacacaccactacacccggctaatcattttactttttgtagagacatggtctccttgtgttttctgggctggtcttgaactccaagagatcctcaagcgatcctcccacctcagcctcccaaagtgctgggattatgggtgtgagccaccatgcctggctgagttcaggtttttctctgttttacttctgtgtcggtgtgtctagctgctttcctactcacagcctcagtttacttagctgtaaagtagtaggaggagagtggaattgggctggatcgttagcattcttgtatgtgatgccagttatatgatttttatggctccattttaattatcgagatgtgactaggtcctcatgaccctcctgtggtctttgtccccacgtgtgtgtgtttatctgtgtaggtcttaatgaaagttacacctatcatcttcacaagcagactgtcatattctctcacagctgcagtgcttgtctcaatgcctggtatataatagatgcttaattattgtgaattttttaatagctgtattaagatgggatttacatctcttacaattcacccacccacctatgcaattcagtggttttttatatattaacagtatacaattatttttttccagtcttttaaaatgagtgaatgaattctgtatctggtgctttgtctgtaacagtgttaacttcaatcagtcaatatttgccaaatgcctgctgtgggcggggtgctggtctcaacactggggagatagcagtccgacaatcagatgaaattccccctgccctcacggagcttaggttcttgttgggagaacactctgtgcctagatatgatagttttttggcatctgttttttgtctagcttttctccagctgttgtgcagagatggttagctggctagtgataacccgtagtctactttgtcttagacctcgttgtcctcactgtttcagacattgctggtaaatgctctatgtcatcttagttttcatatgatcaatagtcactagacatgggggagggagccagggcaggaaatgccaggctggaggttacagatgctgcaggctcaaggggacaagacgcacagggaccctggcaggatgagcatctcgtggttacagggaccggggcatgggctgatgggttcctctgggctcccttgcttatgttccttccatttgctatgatgtgggggtggtggttatgttggaagggcgccggtgctgggagaggcatgtaaactgttagcagccagaagaggtgggaggtttaagtcatgctcattggagtgtgatgctggagacgtattgctttctgttccatggaatgcaaccctcagtcaggacggcacccagctgtccccagatttcgcaaaaccagcctggcttttgtcttctgttgagtcagcccaggacacaaggggccagatgtcctgaatgttccgtcatggtcctggaaaaaacatggaacccccaacagttgggaagctcgcttgataggccttctgactttttgtataggagatcagagatgagtcaaaacaggaccttccagggtatggcccgggccctctctgttatcgtgcatacgcaatgctcttagtggtggtcgcctgtcttcagcatccaaagtatcagacagtgtgtgtagttttccgacttgagtagtattttcttttctttgtacagttgtgcatgtgtgacttggaaggagcatatttgactagatgacacatgggcttctctggagttcctgctctgatcgtaatagtgtattatttttctgaggctgtgtctgtattgtgctagaaagcaaatgagttattatggatcattccaagtgtattatcccatgtatccctgagatgctttgtatgtgaatgctttgtatatgggttaaatataaaatagcataaataaataaccctgtaatactgagtttgaatgggaaatttcagtgtgaaatgatgaggtattttaaaattgtgtttgtgtgtctgtgtgtgtgtatatatatattcctatgtgtagatatctataaggttttagaataacactactacaacaatataattgccaagaacatataaaaatattggcttgtgagggccgggcacagttgctcacacctgtactcttagctttgggaggctgagatgggaggatcacttgagttcaggagttcgagatcagactgggcaacgtggcgaagccccatctctatacaaaatagaaaaagttagccaggtgtgggggtgcacacctgtaggcctagctactcgggaggccgaggcaagaggatcgcctgagcccaggagttggaggctgaatgagccatgatggcgccactgtactccagctttggtgacagagtgagaccctgtctcaaaaacagacaaactggcatatgtttccctgttttcttccattttaagaaaatattcattttaaatctactttacctgagcctatggccagtatatactttactcattccttttgaatcctggtctcatcttgagtttatgtttaatgctttccaccagttctctgttggtatgttgctagtcgtttaggttattgcaagcttcatctgtgacggattctgcaagggactgttgatggttacagtattcccagagttgttacacgttgttactagtttgtgctctttatacttacaaatcagtattgtggatccaaaaatttgtaggtcacattttctgagagtcttaaatatgttactacattttcttgaggcattgctgtcaaagtcttctccttagaagacttgcccaaaggaactcttctttctctaaacgtcagcgattttactagactatatctaggtgttagtcattccgtcagtattttcaggtacatggcatgttctttcagtctctttcaatgtggaacttcgggtctctttattccaacaaagtgtttttgaattgagtttttagtacctgttattttggtttcttctccaggggcttctgttttctgttcatcttatttacctgtcttcagtatttgtcacttcctctcaaatctatccctttcttcatatccttttctttttctaaaaaaaacaaacaaaaaacaaacttgctcttttcatcttctaggtgttccttctaggttggtcttcatttctgaaatactttctttaatgttctgagtttggttacctcgctgcatttttctggttctggcgtacgttgttcttttatgtcatttttgtattgtctccagcttgttttgcagtaggtcaaagtcacttgagaatttctggcgcatctttatctgcagctatattctattacttattctgtttctcctcataatattgtgtatggttttattggatacttctttgttgcttctctgtctctttttttttttgagatggagtcttgctctgtcgcccaggctggagtgcagtggcgcgatctcggctcactgcaagctacgcctcccgggttcacgccattctcctgcctcagcctcccgagtagctgggactacaggcgcccgccaccacgtccggctaattttttaaatatttttagtagagacggggtttcaccgtgtaagccaggatggtctcgatctcttgacctcatgatccaccggcctcggcctcccaaagtgctgggattacaggtgtgagccacctcgcctggcccgttgcttctctttatgtgtagttaggaagtgaaactttaggagagaggcgtggtagagggagcagagctctctctcctgtggatttcgtgtggtgttaggcatactgcagcttgttttctgagctttcctggctcttatcccccatttcatctggatcttctttttccctcttctctaatgtctcgctcctgctaaactgtgattctgcttctgtagctttttccctcactgcagggcccagtcctggaagggagtcctgacagtacagatttgagagtcagtggaggtgggcctgggttaccgtggatctccttgcgctcacctgctaggggagaggaagaatctcctggctttactgcacttctcaacgtggcccaccacgcttttatgaaccccgaatatctgagacaggcctcagttaatttagaaagtttattttgctaaggttgagggcgtgcccatgacacagcctccggaggtcccgaggacatgtgcccaaggtggtcagagcatggttgggttttatacgttctagggagacatgaggcatcaatcaacatatgcaagatgaacattggttcggtctggaaggcgggacaactcgaagcagggcttccaggtcctaggtagattagagacaaatagttgcattcttttgagtttctgattagcctctccaaaggaggcaaccagataggcattcagctcagtgagtagaggggtgactttgaatagaatgggaggcaggtttgccctaagcagttcccagcttgacttttccctttagcttagtgatatgggggccccaagatttcttttcctttcactttccttccaaggagcacctgttggtgatttgcggggagggggctgccggtgatttgggggcctgttggtgattttgggaggtctgttggtgattgagggggggtcctcctcagggcttttcatcagatctgtcgcttgcctctgtgttctacgcagataccatgtaggccttgtggctgtgactttatccttgcctgcttatattttggggtttatgggggtaccttgtcacctagcgttgttgtaaatgctgtctgtgggcttctgcctttttttttttttttctggagacggagtctcactctgtcacgcaggctgaagtgcagtggcacgatctcagctcaatgcaacctgtgcctctggggttcaagcgattctcctgcctcactgttctaagtagctaggactacaggcatgcgccaccacgcctggttaatttttttgtatttttagtagagatggggtttttgccatgttgaccagactggtcttgaactcctgacctcaggtgacctacctgtttcggtctcccaaagtgctgggataacaggcatgagccactgtgcccggcctagtttttttttttttttttttttaatggggattttgagagattaaaaaattattctgctgtcactgtcgtctttccagaatctatttctaaacgggcatttaaaataatactaatccccctttgataataatcccactggacaaagcacaaaggaaggaagctgccagcaagggtgaaattaaaggcgaacaggcagctggtaataggccaattgattacggtggattagagctcattttgcttcacaaaagtaattactctgatggctgctaacgcttgctcattcagagcagagcttcccagccactgtgctgcagttggttcttgggagggctgagatagtgattccttcagcactcagggtagtactgaggtggcaggagctccgcacccctgccaaccagttacctctagcctgagtttcatctgtttaccctcaatgggacatagaaatgtcatcctgaggcccgatgcagtggcttacacctcccagcactttgggacgctgaggcgggtggatcacttgaggtcaggagttcgagaccagcctgaccaacatggtgaaaccccatctctactagaaatgcaaaaaaaaattagccaggtgtggtggtgggcacctgtagtcccagctagtcagaaggctgaggcaggagactcccttgaacctgggaggcggaggttgcagtgagctgagattacaccactgcactccagcctggacgacagagcgagactctgtctcaaaaaaaaaaaaaaaaaaaaaaaaggacatcatgagctttgcaatatggatttatttattcatcactcttttttcatggttgggggtagagacagggtctcactttgtcacccaggttggagtgcagtagatcatagctcactgcagctgcagcctcctgggatcaagcaatcctcctgcctcagactcccaagtagctgggagcacgggcgtgcgccaccacactgggctaattttaaatttttgttttagaggtggagtctccctatgttgctcaggctggtcttgaactcctgggctcaagcgatcctcccgccttagcctcccaaagtgctgagattacaggtatgagccatggcacctagacaaatactttgtattttttttaaatttcctttttattttgagaaatttcaaacctgctgaaaagtcctagtactataaacttggatgtacctaccgtccacctagatttaccaacttttttttttgcatatttctcagtgtttttctaaataaatgaataaacacaaacatacagagatacatactgtgtatagatatgtatgtgtgtatgtaaatatacttttcctaagcaatgtgaaagttgtttcagacattgtgattctttttccctgaactcttctgcacttctttccgaagaacaaggatattctcctacattaccccataggaatgtcagaggcatttgaaccagaacaactccatctggaataggggctgggtagaatgaggctgaaactactaggctgcattcccagatggttaaggcattctaagtcactggatgagataggaggtcggcacaagatacaggtcccaaagaccttgctgatagaacagtttgcagtaaagaagccggctgaatcccaccaaaaccacgatgacgatgagagtgacctctagtcatcatcactgctatgtgacagtccactagtgccatgacagtttacaaatgccatggcaacatcaagaagttaccctgtatggtctaaaaggggggtatgcaccctgtgtttagcacgttatcaaaaaataaccatgacaatgggccaccggcatccctcggggctgctctgttgatggagtagccatgcttttattcctttactttcttaataaacttgatttcactttatggactcaccctaatttctttcttgcgtgagatccaagaaccctctcttggggtctggatcagaactccttttctgtaatagtattatgctggagaaaaaggacagtaactccacagtatctaacatacggttcatattcacggttccctgattgttcctaaagtgtcttttatagccatttcttcccaagtcaggatccaaacaaggtttgtatgttagcttcagctggatgtcatcagatggtccttgaggctgagttgcgtgccatgcaccgtgctgaatgttgggctgtagaaactaggcaggcccagagttgttggttttcaggaggtcatggctgaggaacagccttgttacaaacaaaagcaataaaggttcagatctcctagagcctcctgctggtagccttatttccaagagttccgatttaccttgtaaataaatggcatccagttccctcatggtcttcaaactctccatgccttgttagcttcctggaatccacagaatcctttcacgcttgggcactgacctgtaaaaagccatcttaaaaggcttccaggtacattgtcttggctctcttgagttttgaactgggagcctggaggccagagaacagacactccctagaaatgccttctgtagttctcatgtaattcatccccaaggcatgggctggaatggaacatagcagaaacatgttttactcaagcgtagactagcagcagtgacagacagcttgagggagtcttgttttccttttgctgtatcaactcttgcagtcattagctgtcaaggggaaaatcattgtgtttcctcagaaatgtggtttatttggctagatcctttgggactggtttgtgtcaagggcaaggtgtgtgtttgaggggccaacagcagttctgctgtggatgctgaaccatcagctgtcacaagaaaggctgtttgtatgaacctggacttagaatcctgtggccaccttatttttataccatgttcttgctttggttctgagattcccagtccacagctgcctgtagaatttgtaggattcccagagttcgtatgcagtagggggtctcaaactggaattcctacaggggccaggtagataacggaagtgaataaatcagccacatgtgagagactagggagtggggagggatctttgggggaactggagggtacttggctggtctaaaggggcatcaagtccttagtgccagccctggttgctctgagggtgcccaggccccttgtggtcggacacttggctttttcaagagaaacctagatttttaagggaaatgtcctgaattttaattatttgcacagaatttaaaagccaccttctttccctccctcctctctgtcttcctcctactcgccctgcaaacgtgtgtttcagtcagccaggccagtggggtgtggttctcctgttggatacgtggtgatggtccccctccttcaatcacctttctctctccctctgtctctgctgcatggcccacatcgttgtattttgttgttaactttttatccttactgcattcgcagtccatgtttctgcctgtagtctcaagaggccgagatttgttgagacgactgtgacttgtgcaagagccagattgagttttcagcttggtattcagattcgggacatctcaccctccagctgttatcagcaacaacaactgcaactgtgcagcagtcgcagtccccagatgctatgcctctgcattgtaggaaagggactcatttgaggtcagatgctcagatgcaagttgcaagataatagcgattgtacctccttgttcccaaatgtcactcaaagtgtttcctaggttctgtcactgcctctgctggaattgtcacagaggagacaggtgaactgcaccccttaaaaccccagtatttatcaaagtaataatagtaggtgggtcttgttattcccagatactgtttattatttaatatgctgtttttatattgaccaaacaaatgttcttggctttatagtaccagttatgagctattcagttaacccttttaacccttaccacgtgggccattactgtaaatctatatatatatttgttgttgggagcttttcagtttctaaaggaacttctttttttaaaaaatctttattttgaagtaatctgagatttgctcaagaattgcagggacaaaaaaagaactcccatgtgctcttcctgcagagcgactagttaatattttgctctattggagacagatttatctgtatctatatctctgtgtatccatacaaacttttttcctgatctatttaagaattagttgcaaacatcatgaccatttgcccctaaatactcaagcagataattttctaagaacaaggatacttccttacacgaccgcagtgtgatgataaaatgcaggaaatgtaacactggtgcagtattatgacgtgatatttaggctatattcatatttcaccaatggggccaatttaacctttcatggctaatctctctgactgagttgggatccagtccaggatcaggcattgcactgaagggtcctgtctctttaatctggggaacacctccacagcttctttgtctttcatgaccttgacttttttttctgggtccctcttctggccagttgcttgatagaacatccctcaatttgggtttgtcagctgtttcctcatgattaggttcaggttatgtgtttttgacaggaactcaaggcttttaatccatctccttttggcctaataaagagacactatagcaagtagacttctggtctcacagatggcaaaactcaatgccaagaggtcaaagtcaagagagatgtagcactcagtggccggggctgactgtggctcacagctgtgttttgtttggcacttgagatgtttgaaaaatgagtcaatcactggttaaagacctgatgggtcccggaggaatccggacttccacctgctcttgaagagttggaagatctggccacacagggccatattcctgtctgcctggttttgagtcctggacaatgggcacacattctctactttgctgtggcctccaccattcacaagatgcccctgtgcatgtcccctgggcatgcttcattcttctgttacctgcactgcccctctatgcctgggactctgaaagatatgttatagagctgggcgcggtggcccactcctggaatcccagcactttgggaggccaaggcgggtagatcgtgtgaggccaggagtttcagtctggccagcggggcaaaaccctgtctctactaaaagtacaaaattagccgggtgtgcacgcctgtaatcccagctacttgggaggctgaggcaggagaattgcttgaacccaggaggcggaggttgctgtgagccgagatcatgccactgcactccagcctgggtgacagagtgagactctgtttaaaaaaaaaaaaaaaatccaggataggctcccagttgtgttctctccatctgctgctctgtagtcttcttggggcctgtcgggaaacaattttctatttcatagtagtttctcttgcctgttctccccccaaccccctttttttgaaggtgtttatttgggttgccagacttgtgtttatgtacctcttcatgcagtggtactgttggcattcactcctccaaaaggtgagttgtcacattggtacattagggtattccacactggcttccatggaagcccagttgagtccatgagaggctccctcaccttcccattatttagggaaatcctgcatccctcgagggacctgatgcagctgagggaaatcggataatcattttctgaagtggtgaggttgaatccaccatgccctaggagttagctaggggatgagctggggaagaggactcagtcgtttgatgcctgaccttgaaatatgtccaggtgataatttgagcattattccaagtgtttccctagtcctcactccctaggagaaaatagtcctccttgatttggaatatgatgacactggagccctggtttgcaatttatgagtaataatgatgatgacaatgaattactaaccgctaacatttatttaataattaccatatgccagacactttatttatacacacacatacttattttaattctgtctgtagtttctgaaggtagatactttcatcatcccattttataaatgctaaactggggctcagagaggttaagcaacttgcccaaggtcatacagaggtagagcaagcattcccgtcagggctgtctgacctgaaagcaaacactttttaatggcacaaagtgctgaaatgagctgccttcttggtgccagaggagtagcttatgtaagttttgagtgagggactgacaagtatgattccggctgttaagtttggaaccctgtgattttcccattgcacccaggatattttgggtgtgtgtcatctgtaattaattaccttcttgagtgacgagttgtttgggctgtttctctggctctggatatgcaatacaggggccagtgtgccattctgagtgggatttaccaggtggctaatgagatgggctttataaaataaatagtgcaaggatggttacgggggagagagcactaaaaatcaaacaagctttttacagctccattttccaccccctccagctggcagaaatgagatgccacacagcttaatccagagaacagccaaggaggaatgcagacatcctggaatttgagtcccctggcagcagcccttgccctgtcttattagagaaaactggaaggaaaggaaaagttacccagacttcttgtacgtgggaggtaccactgttttctgaacagggttatgagcaataatcgttatgattgtgatatggcaggagggcacatggcagggagtggctcccaggtgccagagtggcccagaagtgtcctggaggcttgccaaaatacagattccaggcttcaccccaagagggtgattacagagagggcctgggaatctgctttttactttttaatttttcacccctgagtctgttaatgtgtttcctacaagcaaaacattctcctttgtaataacaatataacaatcagaattagaaaattaacattgacacatttctgctgtctaatcttcacattatgctcaactttaaccagtagtcccagcaatgtcttttcttgcaaaatggttgagtccggaatgacacatggcatgtgattttcatgtctgttcgggctagaacagttgtctcttttcttgactttcatgaccttgacgtttttgaagatgataggccagtttattgtgcagaatgtccgtgcctttggtttgcttgatgtttccttttgattagattcggtttatgcatcttcgtaggaatgttgcagaggcgatgcatctttttagtgcatcctggcaggtggtgcatggcttcaatttgttccattcctgatgttaactttgatcctctgattaaaatgatgtctgttatgctccttcactgtggagtttcccctttacaattaatacatattttgtagggaggtttttgagctcgaaataccctattatgcattaaattttccattaattaattttggattgttcagtttctattttattcagcttataatgcattactatcactgttttgatgcccggatcgtctcagagcgtccgagcatcaaaacagtgataataatggattataagctgaatccgtcccatccatcccatttatcagtgggaacttttatgagctggcttctgtgtccttttaaagtgggcctgtaagttcacattgatgtctttaatcccagtccaacatcaccattgacttctcactttcttgacgtatttgttattctcttctccaataacaagatacctggctccagttatcagtaatatattcagttattgatccatccccttgtaagttaactaatctctgatagctttgggctgaattgcttgggaatagaaagtcagggttatggggagatttgctttctggagaagctcctctgctctcttcattatagagatcctccatcctctgaccacatctggaaggaccctggcctagtgctggagggtagaggctttggagttgccctgatgtcagttccacttccactcctgattgaccttggccggtcactgaccacaccgagactccatttccttatggatgagggcaatatttcatggtacagagaaaaataagacatggccactgtcttcaaggatctcatactctagataggggaagatgagcacaggccaggggtattaaagtatgagacttgttaagagagaagcttgtctagaatacgctgggggcagaggagggagctgtcacaagccccatgtggtggaggcagggttggcaggaaggacttcagagagaagagggcctttgaggagacacttgcaaaatgtgtagctgttcaccaggggcctggggcagatgggagagttgcagacagagaatcagatcaaccttagcaaagacacatggggcagaaagagcttggctggtatgggcaacagggaagagctgtgattggccaaatcccagagtggaggtctgaggctgtattaggtggatgtctcagctgctctgggagccctgacagctgcaagaggaggggagggggtcgggtctagcttagagagcatggtgtattgggtagcggggcagcagcctgggtagaacccgggaggagcctttccaagatgacgctgggggaaagtgctctggaaggtatcttttgctttccctcttgccctgatgacctcagtgccagaggcgctggctggctgggtttattccttcagacctcttaggattgattgtttcacaaagatggtgtagagcagcggtccccaacttttttggcaccagggactggttgcgtggaagacaatttttccatggggatgggttggtggaatggttttgggataaaaccgttccatctcagatcctcagacattagatttttatagggagtgtgcaacctagatcttgcatgcccagttcacaatagggttcgtgctcctatgagaatctaaggctgctgctgatctgacaggagagagagttcaggtggtaatgcttgctcaccgctcactcaccgctccatcacctcctgctgtgcggcttggttcctgacagccacggtgatggatgacccctggtgtagaggactggtccagttttcactctggagttgcactgtctgcttgtgagtcccagctctgccacttgtcagcttgtcacttgccaggaacatgacttacctcctctgtaggtatctcagcctgcagccgtctaaaaagctttgcttacacctttccccttctctcctcccccactcagtgctggacaggtggtagctactagcatcattgtcatggtgacaattactcgagggtgtgagggcaaaagtgttctgtaaagggcagtgtaagaatgcatgttgggctcagtgcagcaacaggctaaaggagttctgatgccttagaaaaggtggcggggttggagttagggtcagaagagacttaacaggaatatgtacagttagggaaaaatggtttttcaacattggttgttttattttgcagtgaacttgacctttgaagatttaggatgtggctgcaaacaccacaaagccaggcgatttatgcctcccttcttgccttttattggtgcctattctgggggagtcctcatggtcttggatagccttgccactgggccaccttcttcttgtagttgggtgtggttatggttgatgcctactcagtacctgctggacggtaggcatgaggtcccctcgagctgtgcttttttacatctagggaaagtataattcccataggtgtatcttagtgtggtgttttgatgcctgagaattaccaaatgtacttaccaggttcgttagttttgttgtgagtaattttcctttgagtagtgctgtctggggttgctggttgtttactctgacattggggcaggcctaattgctttgacttacaaacattaattattgcagtcgttggaagctgtttgagaggtacttgccacctactcaatgatttgctttcgttcccatgcttttaaagaaatctgcagggtagccagcaggcttgtttggggctgggagtgggaaggagttggcaaggctttctagaattggacaggcgaatatttgaatacttgtctccatgtgcacggctacctcttcggtcctctcagttctggccaccatcgtttcttgcctggatgaccgtaatggcctcctatcttccggcttcttctgtttccacccctcattccatttgctttttccacatagcaagtctgcattcccttgcttgacacctttttaatttatttttttgtttgtgaattgcagtctcactctgttgcccaggctggagtgcaatggtgcgatcacagctcactgcagcctgcaactcctgtgctcaagtgatcctcctgcctcagcctctggagaagctgggactacaggcacatgtcaccgtgtccagctaatttttaaattaattttatttcatttatttatttatttatttattgagacaaggtctcactttcacccaggctggagttcaatggcacgatctcggctcactgcaacctctgcctcccgggttcaagcagttttcctgcctcagctcccaagtagctgggattacaggtgcctgctaccatgcccagataatttttgtatatttagtagaggcagggtttcaccatgttggccaggctggtcttgaactcctgacctcaggtgatccacctgcctcggcctcccaaagtgctgggattacaggcgtaagccactgtgctcagtctaaaaaatttttttgtagagatgtgatcttgctgtattgcccaggctagtctcaaacttctaggctcaggtgatcctcctgcctcagccttcctaagtgctgcaattacaggaatgtgccactgcgcccaaaacatttatcataatgtttttggagtttcatccaagttgttgcatgtatcaatagtgcattcctttttattgatgagtaagcattccattacttacattccactacaggagtttgtaattccattacaagagtttgataccagcctgaccaacatggcaaaaccccgtccctactgaaaataaaacaattagccgggcctagtggtgggtgccggtaatcccagctacttgggatctgaggcaggagaatcacttgaagccaggaggtgaaggttgtagtgagccgagatcgcaccactgcactccagcctgggcaacaagagtgaaactccatcttcaaaaaaaaaaaagaaaaagtctttcacatagcaaatccagttaaactcttttttctactctggacgatgcttttagtattatatctaagaaatcttctttgtctaactcaggttaggtatgattttctccaacattttcttctaaaccttttatagttttaaattacatttgtttgtggtccagttttacttaatatttgtataaggtgtgagtattggttgaagtttattttttttgcatatgaatgtcttgttgttccaaaatcatgtgtggaaaagattgtcctttctccagaagcgccttcctaccttcgtcacattgcttgattgtgtgtatgggtttattccctgattctttggtctgtcttgttggtgtgtgtctgtcattttgcccatatgacattggcttgagggctgtagctttacaggaagttctaaaattgggcaatgtgagtcttcctgctttgtgctgctttttcaaaaatgattttggctattttagtttctttgtctttccatatgaatgttacaatctgctagtctatatctataagaaatcctgctgggattttgattgggctttcattaaatttatagatcaattttggggaaattgacatcttaattcttttgagtcttctaagccatgaacctggtatctccaggtagttagctcttctttgatttcttttgttagtattttgtagttttcagcatgcagatcctggacacattttgttagatttatatgaatgtatttcatcttttggagctgttataaatgattctttttaaaagtaatttgccttctcattgttcattgttagtgtatagaaatacagttgatgtttacatttgaccctgtgttctgtgaccttgaaaaactcggttattctgtgaccatttttgtcagttcttgggatttcctttgtagatggtcatgtctcttgtgaagagggaaagttttagtccttccttcctaacctgtatgtttttttgggtggggagggccttatttcaccagctagaatctactgtgctgaacaggagtggtgagggaagaattgcttgactcattttcagtctttggaggaaaatattcagcctttaatcattatgtgtgatgttactataggatttgggggtgggtagttttttttttttttttttttaagaaggaatcgcagactctgtcacctaggctggagtgcagtggtgtgatcttggctcagtgcaacctccgcctcccaggttcaagcaattcttgtgtctcagcctcccgaccagctgggattacaggcatgcaccaccaggcccagctcatttttgtatttttagtagagatggggtttcaccatgttggccaagctggtctcgaactcccgacctcagatgatccactcacctcggtctcccaaagtgctgggattacaggcatgagccactgcatctggcctgggggtatttctaacctcttcatacattttaaaaagtgctctagtaaagtgcattgttgaaaaattaaagaaaaatttccaattaattttatcatatagaaatgagcactgttaacgttgtggtctatacatttccagtgcaaatatatccatgtaaatagatataaggggttagagtaaatacactctgtactctgctgcattcagttaatggtatatcagtgtgagtatatatgtgtgtgtgtgtatatacgtaatattcatccctggggataaacatacatatttatcatagctttgacagtcctatagcgtcctattataggaggatgcaccataactttccacccactcttacattatcagacaattaatttgcagccagcttctttcttttatattcaaagcatcctcatgcatatggttttgagacttctctttcttttctaaatacagtttcttagaagtagacttgctgggtcagaaggttacagttcttgaagctgttgattcatatttcctaaagctcacctgtcaccaactgcttacatttatgagatgcctaagggggttggcagcagaagcttgagctccataactcgaggaaagttccttagcctctcttagcaaagctggctggtcaggaggatcctgttcacatctgtgcaggagtcttaaccgcccaagagattctgcagacctgtgctcgttttctcacgcaatttttcaaggccttacgttttcaatgttgccctgttcacttaattcgctaaacgtgtataatgtaataggagactttgaagttaaaggatatgggtttaaatcccaagttggagtgtgtgttagactctctgggcctcaaatttctcatctgtaaaatgggcacagtaaaaccaacctcgtgatgtgttgctggtggtctaatgagacaccaagtgtgtggcagagaggagagggacataggcatggagaggctgaagtgaactgtggctctgcctttgctggttgtgagtttttggatagttcaattagcctcattgagcctcagtttcttttccttttttttttttttttttttttgagacaaggtcttactctgtcacccaggctggatctttgttcactgcaacctccacctccccggctcaaacgatcctcccacctcagcctcccaagtagatgggacaacaggtgcatgccaccacacccagctaatctttgcattttttgtagagatggggtttcaccatgttgcccaggctgttgtcctgggctcaagtaattggcctgtctcagcctccccaggtgggtagcatgagccaccacgcctggtcttcagttttttcatgtgtaaaatgaaggcagtaagaaaaatggcagcaataataacctgttttgtagggttactgtgtagataaaatgtgagcatgtctgccacacctcgaatattaagtgccctactcagaggcaggtgttcatgtgttgcagattgaaaagcatatttcccactacatacgtatggatctctgggaatgaggcacagcttttacctgtaagggggtcttgctactgtgctgcttcccacttcatagctagcaaggagggatttcaaggaaggtgcaaacatctcaaatgtccaactctgccacagtccacattggcaacactttttttacttttcttttttcttttttcttttttttttttttttggagacggagtctcactctgttgcgaggctggagtgcagtggcatgatcttggctcactgcaagctccgcctcccaggttcaagcaattcttctgcctcagcctctttagtagctgggattacaggcacatgccaccatgcccagctaatttttgtattttcagtagagacagggtttcaccatgttggccaggctgatctcaaactcttggcctcacgtgatccacccacctcagcctcccagcgtgctgggattccaggtgtgagccactgcacccagccaggtgtgatttttaggtggaatcttaacacagtattgaaagatttcttcaaactagaagaaaagcaggtatctgaaacattttagtgctggccacagagttggagatgaacagggaagctgaggatcggcccgacggctggcagcaaatgagaggagacctgaccgccaaacactgacatgacttctgttggtcatgcggcctcttggaaaatgtttttccatgaactgttgtttagaaatgtctataactgcctttctttccctgattttaagatatgtgacttgaattcacatgtgaagattgggagtaggctgggctgggcaatgaggctctggctaaaggaatcctagaaaacatgctctacaggctgggcgtggtggctcacacctgtaatcccagcacttggggaggctgaggtgggcggatcacttaaggtcaggagttcaagaccagcctggccaacatggtgaaacccccatctctactaaaaataaaaaaattagccggtcatggtggtgggcgcctataatcccagatacttgggaggctgaggcaggagaattgcttgaacccaggaggcagaggttgcagtgagccgagatcatgctactgcactccagcctgggcgacagagtgagactgcatctcaaaaacaaaagaaacaaaaaaacacatgctgtacaatccccatcagggaagattttgtctcccacaaacattttaaggacttgttattttgtgtcaaacatttgtgattcatgtcacagatggagaaagtgcagacacctgtggaggcatccatgacaggctttgtctaggacgaggggataactaagggactcccttgtggtttactttctccagagctttggagatgaacgtcgagttctcaggtgatgcctgagtctatggtagtgtctgagtttgatcctttttttttttttctgccacaatacagcacagagaagcaaaatacaaagaaagtgctgttgccgtgggctgagaagtagtcagctgcattgaaaacagacgctcggcaccagggatgagcagtctcaagtttttcaactaagtcagtgtttggcgtatctatagtagtgggtggtatttccatccgtaaatagactgagtgagaggcttactgtggtgcattattaagtgagacgaccagtctcagaaacatttatactatcctgtcatagagactctgagtgttttgggttggtagtgattgtcaaagcatggaggaaggcctgaaaggtatatactaggtttttgccattggttaccatgggaaagtgttgagtggaacagtaaacaagggaaaaaagccttcagacattcacacaaaaattaaagcattgtgaagggtgtatcatccccctaaaattattaggatgtgtgtgtgcacctagagaaataataggatggatataaaaatgttaatagggtttatttcaaggtattggggtcttaccatgttttttgcatttcttcttaaatgtgttctgatggagtattttgcaatgagcattttttatttttataatcacagaaaaaacccagtcttcagctcttctcgttgcaaggaaagaaaaaatattctagcacatttaaaggcacttagactcaagacctgaggtgtagggggtggggcagaaatagaaaacgtgtaagaggcacctccctctggtagagctggtcagaaaccaagtctgaatctcaaagcagatggcgaagagtccttgtgggccttgggggcagggaaacctgggttcagatcttaccagtgagttttactggcgaccttggtcaaacaccgtatttgtccaactcttctcctgtaaaatgtggagaatactgcaggctattgtgcatttttctactgaatgaagcatctttccgctgaatgacggatggatgaatgaatgagtggatgcatgcttggttcaaagagacatatgtaaagtctaaatactcaacaaatggcagtttttccccctttgtcctcatgttctgttgtcacccagtgtacctggggagtgagttcagcaggtggggtcctgtcataccctgggttctgtgttccttagtgtaatcttacatgggggtggatgtggagttggtccaactgcttgtctttatgccacaatctccttatctgtaaaatgagggttgtgttagtgctttggaaggattcaaggagattctatacagacacttgacatgatgcctggcaaataataaatgtttagtacaagtcacagttgataaaagtattaagagcattccccagggtgaatgcacagtagtcagtacatgcttctgcaaatggagagaagactagagttcctgacactgaataggcacctgataggtgggtagctccaaacagcctaagcacagcctgtgtctgtgttctgaatttgtggacactggaaccgattggtgcttatctgtctcatgaaagaatagttcttaaaggcactctgcagacatgcccaaggtaacacaaccatctcccgtgatgatatctaaaccatgagaatatattaacatttataagatgcaaattgtgcttttctttacacaaattcaccacccacccctgccccctcctgtgggtccacattgtcactttttaaatatatatttttttaacattcttgtacctgcagagagaacgaggtgctcaaagtccaactgaagaaatatgtaggagctgtccagatgctgaaaagagaaggtcaaacagctgaaggtgagggggagcctgagcccgggttgggaggggccgggcttttccattaacacctgtacgtggcacgcaatagacactcaatgtgtgacgagtgcatatgtggatggattagaataatggtgctgctcagcgttccagaaaattaatcaggtggaaaacctgatgcgtatccctgcaacatgcataactagtattgtaagactcacttgctagactattagcaacagtcttattggtttgtgtacttagagaattttatgtccagagtcttgagacagttgcatggcagtgaaccttgtggtatgatgaagtcacagcaggccacgggtgcaagcaacagaaaggcaagatggcagagaatcagagcgctggacttaggctgatcaggttccaattccagctctggttaagttttctaatctctttgcacctcagttttttcatctgtacaatgaggttggttgacagcacctacctcatgaggcaatccatgtagacgtcttagcataatgcctaccatagaataaatgctgaataaattttagctattattattattattaatcagaaattccagcagatagaagaacagtcatgaagatcttgccaaatgaggtggggccatctgctgcttctaaaatctcctaaaatatttctcagggcagcctgaagaaaggatatttaactctggctgatgtgtcttgcagccctcagccaaaagaccgtaacaaaatttccttaaagacaagctcatagagtgtggacattttaacaaacagtgggtgttccccacattcacgtgtctttttttttttttgagacagagcctcactctaccgcccaggatggagtgcagtggcacaatcttggctcactgcaacttccgcttcctgggttcaagcgattctcctgcctcagcctcccaaatagctgggattacaggtatctgccaccatgcccagctaatttttgtatttttagtagagatgggggatttcaccatgttggccagtcttgtcttgaactcctgactccaggtgatccgtccgcctcggcctcccaaagagctgggattacaggcatgagccaccgctcccagcccacatgtcttcagagtcaaccaaacctgcactgaattcatgctcacccacgaccacctgacccctttgaattattttactatacgtaccaggacatcacaccagtgtcatgagagcattgtgaggattttccaaaacaatgaattcagagtttctagtatggtacctggcatataataaatggtggtggtttttttgtgtgatggagacaggattagaatctggctatggcttatttagtaatagtataaagatgtgaatgtttttgaagcttgtatatttcttttggttactgtttgatcaggatcagcttattggtgatgctatttgataacatgccttgctttattcatatttgggtcagtaactgtggtcattctggagttatcagtgcagaattaatcatctttctctgtggcctcatgcccttttcatacagatattgctattatggccctgaattcatctcattatacagaattatttatatgttggtctcccaagtttttacatctcatctctgtttctccagcaactggctttttagtcattcactacattcattacatacttggaatgaatagtatttgtctagccctttacagcctttccaagcaagctcaaatgtactctgatttgactcagtaaccttgtgatgagtaggtatttttctgttattttaaagtttgttattagaggcttaggagagcttaaggggctggtatatgtgtctgtggtggaaatgaactcacgcatttttctccaaacctctggttctttgcattataaaatgcttttaactttactgtgcagaggaattgcctggggagcccattaaatatacctctttccaggacactgccgctgggagttactccagtggacttaggatgaggctgtagatttgcacgtctagataatgtgactctaatgcaggtgacctgtggacagcaccaccaccttttgtgaaatctacaagttacttacacagaacttggattcagtacaaaaagaccattaaagtcgggttaaaaagaagcaccactgggcttgcttttgatttgaaaacctcagcgctacacaatgcatttctaagtaggaaaattttgaacctaatttgcaggttccatatgcccattctccccaaatgggcctatggaacctacagtgtacagaatggtttttcatagcagctgaaggtccatttccccagaccgatcctgagtgccctgagccacagctggatatgagccatttcaggatgtagttgcggcagctcttacatgaattagagcggttacgtacgtacggcgactccacctagcagcagtctcttacttctgcattattacattcttgtgtaaaaagcctccaggatttaaacaaaacaacttaaaatgaacttttagaataaacattggcaacctttaattttacaggtatcaaatttcagattcccacccttttttttctctctccaagagaatcattatttaagcaccaaaataaggactggaatttgggtggcttcattatctaatggaaagttttttttgttttatttttcttccccgaatgtggtccagaagtgaggttgggttatttgcctctcaagtgctgtttttccttggtgatgtcagatttgccggaagtttacacttttatttgcgcttttgaatctctcacctcagggcaaattcttcatgctcttcctccagcattagaaccttggtgcaagggctgccatatctaccaggaacttgcctggcaattccacttcgttgtaactcttactggtcatttgattaattctgttgttaatggcgttggacaccctttctcctcgccacggagccagtgtagggaagtttcacttatgaaagtaggaaatcacttaaaagaggaggcgatcctcctcctctcctttcacttacgagagcaggagatccctctgaaaactcatgctttcattttgggcttattgctgaaatgtgaaacaagatgtttgcaagttggcttcctgcctgcagagaggccccttggcagctcactgaggggtctggggagagcaggtgcatcacttcaaccttagggttgtgtggacaagactggctcattaggagtgggctcacattagccactgtcaggtggactggtggcgtgggaggtgacatttctgaagttgtgtagcatggccccgctgtcaggtggactggtggcattggaggtgacagctctgaagttgcgtagcatggccctgctgtgaggtggactggtggcattggaggtgacagctctcaagttgtgtagtgtggccccattctcaggtggactggtggcattggaggtgacagctctgaagttgtatatcgtggccccactctcaggtggactggtggcgttggaggtgacagctctgaagttgtatagcgtggccccactctcgggtggactggtggtattggaggtgacatttctgaagttgcgtagtgtggccccactctcaggtggactggtggtattggaggtgacagctctgaagttgcgtagtgtggccctgctgtcaggtggactggtggcattggaggtgacaactctgaagttgtatagtgtggccctgatgtcagatggactggtggcattggaggtgacgtctctgaagttgtgtagtgtggccttgctgtcaggtggactggtggcattggaggtgacgtctctgaagttgtgtagtgtggcctcgctgtcagttggactggtggcattggaggtgacgtctctgaagttgtgtagtgtggccttgctgtcaggtggactggtggtatcattctttgggtgtggtcagtggctgcatgttcagctgggaggctggccactctgatgtttccacaacagggttgttcttgtggaggtctttgctgtaagacaaccatcctaggcagtgggcttctcttggactcttcccaggagcatttgcctgacgtgagagcttgctctgtgtactgaagaagagattcccctgctaggattggccacacgtgactccagagagacatgggtctgtccgtgtcacatggcttgagtgacttccccatccacatgtgggtagtgaacatctgtgtcctctgtacttgctccagttttcacttgaccagcgtcctccctcactgtcagtcctgtgatgtcggtggcttcatccttggcctggcaccttacctggatggctctggctagatctcagggcgttagtacacaatcaacaagaattcttgctttcctgttaggctgggagactggggccgctgtagtcagcttgtttccacatagagattgggaatgaggccatcgcacagaaagagcagctgagctgaaaggcagagagaaagcgaactctgatcctgtctttagagcccctgaatccagctgtgcctggcgtgacagtcctaccctggactttttggtaataggggcagtcattccgccagcctcccctgctcctgttatcaagcttgattagttttctatagctcatgtgttctatggcaaattattatgtctttcctggatacaggcctgttcgtccttgtaaagggcgattatttctgtggaattgtctttccaagtacagtgtctgctcctgtgctgtaaagcttttcctcctacctcccctcttactggatgctccactgtcataactgttcatggccaccatagcgtagtcctgttcaatagcaatggattttaaagccacgagctctcctcggcatccccatttaattaatctgcagtcagcccagggagagagggaaaaggaatagaccattgctggtggccatcaaaataatcagcagcaagggcaggagactgagtgggaggaacttgacagatgagggaggcttgggagcaatttaaaaagtttgttctcagaaacaagcaaaaaattgggaagtcatcagcctgtctggtgtgtcgtgtctttgctgctgtgtgatgtgctcagggattcctggctccacacccacatgtgcttcgtgctctcactggggtgtcagtttccctggggtgagtgcagcgattcccgattccactcctgcgtgtgctttgtgctctggggtgttagttgccctggggtgagcccagtgattcccagctccacacccatgtgcgctttgtgctctcactggggtgtcagtttccctgggatgagtccagcaatccccgattccacacctgcgtgtgttttgtgctctggctgggatgtcagtttccccggccttccaaagaatggggcagggcattttcgaaggctgattcagtgaagatggagagtcgtgggctaaatgattcctagagcccacagtgtttcaggggagcttgcagggtaactttttattctttttttctgaaccattgcaggcttctgaaccattgcaggcatccctatgtgcacggcctgctgtttccactcccactgtgcacagaggcaaagatgtctcgtttgaggcagtcttcggttgcaaggaataacaatccaccaaagctggctctgtgtgtgtatgtgtcccaagtggaataaacatggaacctcataaatcccgtcactctgctgtttaccgttcatggttttccagtcctgactttttgatgatggccttcagtgcttgtgatctggctcttccctaagttccaacctcatctcccaccaccctccctcttgctgtctccaccccacccacgctggcctttaggctgatcctcaaacatgccaggctggctcctgcctcaggctctttgcacgtgctgcccctatgcagggacgctcttccctggtctctgtgtggctggttccaccttgccatgcctgtctccattcagataccacctcctcttgactgccctgtcttaccttgtgctgcctccctcattctatctccgacttttcatcacagcacttatcaggccctcaaggtatcttggtcattgattttcttgcttgtttcttcccggtgttccaccttgcactgtacagcccacaagagcagggatgttggcatgtcttttcccctgctgtgttgaaagtgcctgcacagtgcttgatccatgacacgtgctctataaatgtttataacataaatgaatataaataaaataggagctgttggatctcatggccttgagttgattccagatctgttgcagctgtggagagcctagtagtggacaaattcatagacctttcttctagtgccacccaaataatgtgcatcacccccatgtaactgcatctttcagttgtgcctccagctggattctcctgatcgtgtgtggtttttgcttttagtgaccacgattatcatgtgaccttgaccctgccctggttgtgtcattcagagctcttgtgatgacaggagtcatacaatctgatttaatctgtcttaagccaaatacaagagaagtccaggagtatctgccttcagggatggtttgatccaggggctgcaacaatatcatgggaagttttttctttctttcttcagtttctcaactccaatttttttcattgctgggagtgatgtgctggtaaatgtctaacaaatagctttcaaaaaaaaaaaaaaaaaaagccctgatttagaatgtttgcagatttccgtggtgttgtaaatcctccttctatgtctgatttcagactctgccaacacgatgtcactgtttgcagagttggaaagagatgcacgcagttagctcccatgagtcagtacacgggcgctcccatccctcactgtgtgctggccgccttctcagccaggtgttctccttgggctggcaagaggttgccagcagctgtagctttagtctttctagcaggcccagcaggagaggagcttctctcactgtcccgtctttccatctcttcaccccacagagcaatggttcctagtattggcttttaatggagtcacctgggaaatttttaaaaatcccaatgcttggccccacccagacccaaaaatcagtagtgggaatgaggtggttttttttttttttttttttaaagcttcccaaatgattccagtgtgcaggttggagtacagcgtttggaaccactgccttggaggatatcactttccaattaatgaagttcagggtcagcaaatatgctacaaatgtgctgacactctctgattcttggccagtagctgacactgtaaattaatcaaggtgcacttttcttcttgaatccagatttagcctcagaatttgtcgcttcatgtaggtaccattgagttaagacctgggaggctaggccaagcgcggttgctcacgcctgtaatcccagcatttcgggaggccaagacgggtggatcaccagaggtcaggagttcaaaaccagccagaccaacatggtgaaaccccatctctactaaaaatacaaaaattagctaggtgtggtggcaggcgcctgtaatcctagttacttgggaggctgaggcaggagaattgcttgaacctgggaggcagaggctgcagtgagccaagatcgcaccacttcactccggcctaggtgaaagagtgaaactttgtcaaaaaataaaataaaataaaaaacaaaaaccagggaggctcaatgggagctgttcaccaccactgtgtgagttaacccagtgcctttactgtgccccaatccctgctcccgcaagaatccgctgtgggtgttaattgtatttcatctccgttcccgacccttcctgttccaccgcagtgtctcgctctcactgctcatcacagagctgctttgctgttacgtttgtctcatgtgcccccatcacaaacactttacgaccccactcttggctcatccagtctcctttcctagaaactccgcttcccttatgcttgctcaggccagatgttgcatttgtggtacgatccagctcttctcctgtcacctgaaagaaatctaattacttggatctttcagtttcctaaacccctgtggtgcttgctacgagcagtaagcagagtctggcatttgctttttgctattatgggttattctgtggtcacgtcttgtgtgtgtgctctgtctactctgctagaccttgtgaccacataaggggtagggtctgggacttagaaacatgcaggttttttcttcttttattaatcaagtacacaacaggtgcttaataaaaatttgttactggggtccatccaagtgactttcaggaatgatttcagagtcacagagatgttgatgtagatggaaagagcattccctgagaagggaaacaagtttggggaagcaacattccataccacttaagagcggggagatgattatcattctcctttctgcccgaagtgaccacaccactctgctcacattccatgggtgagggctagtcatacaggcccacctgggtgcggagggtctcggaagtgttctctctggccgggcagctgctttgcacaagaactctacccactgcaagtggggagcattgagttttggtggctggtcggccagctctgctgtccctgctggggcactcagaggtgtgtggtctccatcttctcactcatttgtgtggctcttcagaaacagcttactttggggtttgtaagctctcagaaggaatgcctgataggttgtgaggatctatggtaggaagggtgtccaagaatgtgctagcaacatgtctctcagatatactgagtcacttggctgggtgtggtggctcacgcctataaccccagcactttgggaggctgagtcaggatgattgcttgagcccaggagttcaagatcagcctgggcaagagccttcagggagccatgactgtgccactgcactgtagtctggatgacggagcaagaggtcgtctctgcaaacagttaaaaaaaaattggccaggtgtgctggtgcgtgcctgtagtcccagctctttgggaggctgaggtgggaggatcacttgagcccagaaggttgagactgcactgagccatgatcatgctactgcactctagcttgggcggtagagtgagaccatgtctctttaaaaaaaaaaaaaaaagactgagtcacttgttactcgtttatttctccatttatggagatccttgcactactaggttgcaccttggaaatgtacttagctttgttaggggctggtagaaggtctgttctgcacgggtacattgtggtgtcatttacattggaggcaccagttgcgatagagggaccatgttgtagctgcctctttctgtaaggtgcttttggcttctcctgaaaatctcggtttactaatgggaaaaagagggctttagataaatttagttgtttactgacaaatggggcaagcaggtattccctgtgaaactcacgggttgcaggggggtaaagtataatgtcctaactctgtgacggtttggagcctggagagatgatgggcagattgtggtaggatgatctcagctcattgtaacctctgcctcctgagttcaagcgattctcttaccttagcctcccagatagctgggattacaggcgtgtgccaccatgcctggctcatttttgtatttttagtagagacggggttttgccatgttggccagactggtttcaaactcctggcctcaagtaatctgcccaccttggcctcccaaagtgctgggattacaggcatgagccactgtgcctggctttgaatgttcaagagtttgagtgaccacctgctgtcctctcactctccagctcgagacccctcatttctgtttggaccagatcctggtggggctcaacggctccatggctgggacctgtaggtggctgaagggatgctcctgggccaccagctgcgtgtttgactgctctatagtctcatcaggaccacttaggagacgtgagaccagcagtggccccaactgtctgctgctcagccctcctcggtcaatagcaggagttagaccttgcctacctgctgctctgcacttaagtcaggcattgcttatttgtgtgttgtccttaacaaggtggcatgactttaggacactggccctctgttgttgtcgagcctgaagactcgcttcataagagcctgcccatctgactctgcgtggggctgagaagggtagcaggtgctggcggaaagagtgtgggctctggagacgaattcgtttgggttgaagtcctggttcagtttctgtctgtgtgcacgtggaaccttcaacatcgggtacctattgtctaatcagtatccattccccctttcctggtaatctgttttttctttggggaaccctctgtccagccctcaatccatgtggtttatgtgggcctgtcatcccactacgtcggctactttccaggcacactggttcagggtgtgtgtgtgtcttggtcagggccagccactgctgtcacagtgctgctggggtctcagagcaggaggcacatgcctttacttgctggatttggactggagaggctggggctggggctcctcgttttgcactcaagggactcagacgttccctccactttttttttttttttttaaagacacagggtcttgctgtgttgcccaggctggagcgcagctggacgatcatagttcactgcagcctcaaccttctgggctcaagcaatccctcctgcctcggcctcctgaggagctgggagcactggtgtccaccatcactctcggtgggactgagaagtcttgcctgagaatggagtcgatgcagaggaaggtagagccaagagacagagaaagtgaatccagccaggcctgaagctccctctccctctggactcctccactgccgagcttccaccacctttctggtccccctgggcttgtcttcttttttccagctgcatccttgcttcaggttgtagccaaggtgtcctcacctgctggccattttctctcacatgttccctccctccctcattccctccctacctcctcttttcccctatctcctcccctcctctctcccttctctcttgtttcactctgctccggtctattttgtatttgtttgatgggctgaatctcaagtggcctttaccttttcagatactaagtttgtaaacaggagacctcatcgttgctctccccactgcttgaaataactgccttctgggcactgttttcacctgcaaccctgttttgaggagtaattgagagaattagatgtaaagttcccagcacagcctttagtgcagagtgaggcttcataagctgtttttcccaccacctccctcactttttacacagactccaaaacccctgggtggtttgggaagttaggttatttgatttgtgcagagtacaaggtcagggcaccgtttcattcattcagccaacattgattgaatactccttgagtaccaggcacagttctgggtatacttcaggcccaaggagactcctcaggtttagtgggagagatggacactaaacatataagcaagcaggtaatttcgaatacatattctgatacagcccaaccttttcccacaaggccttgtaaccatctagagaaatccctggctgacagataacagaagctctgttcattgggtacctgtaacgtgctgggccccggggtagctttccctgcagcttttttccttctaacagctctgtgaggatgggactgttgcctccattttacagatgtgagaaaccaaggctctgagaggtggatgtgctgaagctcactgtattagtcagggttctccacaaaagtggaccaataggggtgtgtgtgtgtgtgtctgtgtgtgtagacagattgagattgatcgatattttaaggaattgacccatgttatggtggcatctgtcaactccagaatctgcagggtgggcctctaggctggagtccagagagaaactgatgttgcaactcaagtccaaaggccgtctgggggcagaattcgtacttccttatgaaacctccgttttttgtttgtttgtttgttttttcttcttaaagccttcagctgattggatgaggcccactctcattatggaagataatgtgctttactgattaaactgttaatctcatttaaaaaatacctttacaatgacatttagactggtgttgggtgaaatatctgggtactgtgacctagccacattgacacatgaagttaatcattacagtcatccacctagaaagtagtagagccgagattcctacccagatctgtctgttaaacccatgctttccccagtgcttctgaagtttattctctcagacgtgttctagggatagtgtatgttgcctctcctgggcctcggtggtggtgtgtgacgagctagcccagagacgcctgcctatgtggggcagcctctgtgtgactggctagcatttaccatgtactttgtcctgagaaaaaatgcgccatgttcgcctttccccccggagactgaaaactgattgtgtgccatgagtcacatggggagccaggttagagtgggagggactcggaagtggacatcagggttggcggaaagcagaaccattgactttccgcttctcaggagcagggctgtgtgtagactggacctgctctttgtccttgaaggctacttcgtccatggtagacagaagccattgcctggaagaggagcctggggaagtgttaatagaactggagcgggaaaggcaggcacagagcttctggttggaggaacctgtccaatcccagccctgtcatttactagctctgagctcacggaataagttgccatctctgagcttcagtatttccatttgaggagtaaagataatatatattttatatatgtttgtaggccgtttgtatatcttcttttgaaaaatgtctgttcttgtttgcttactttttaatgagattattcatttttttcatgactgatgtgtttgagttccttgtagattctgggtattaaccccttatcggatgtgtactttgcaaatactttcttgagtggagaaagaaaacgtggtatgtatacatcatacaatactactcagtcataaagggctgggcgctgtggctcatgccggtaatcccagcactttgggaggccgaggtggttgaatcacctgcggtcaggaatttgagacgagcctggccaatatagtgaaaccccatctctactaaaaatacaaaaattagctgggcatggtggcatgcacctgtaatcccagctactcgggaggctgaggcaggagaatagcttgaatccaggaggtggaggttgcagtgagccgagatcgtgccactgcactccagcctgggtgacagagtgagactctgtctcaaaaaaagaaaaacacaaacaaacaaaaaaaactactcggacataaagaatggaatactgtcttttgcagccacttggatggaactagaggccatcatcctaagtgaagtaactcaggaacagaaaaatagcacatcctctaacttagaagtgggagccaagctgtgggcacacaggggcatatagagaaacataagggacattagaaactctgagcaggaggggaggcgagggatgaaaaactacctattgggtctagagtacatgttgtttgagtgacaggtacactgaaagcccagactttgccgctacacagttcattcaagtcaccaaaagccatttatacccttaaaactgttgaaataaaggaaaaaaataaaattaaaaacaacattgactttatagaattgtttgcagtttaaaagtgatgacacacgcaaagtagcaggcagtggttggtgttgtgggttggaaatgcatttaggagagtgtccaggctgtggaaggtcacagcacattagcagacacctgtaagttagtttctccaagtggataaataattaagatgagaattatagagcaaaccttttcaaaagcttttccatccattaccctgacaaaacagtatttgtgtgattagccagtttcccgacctttaagtaaaccctgaacaggtaagccccagtacccagctatgtggccaccccaaattgcaaggtgggctgggagacgtggggcttatttggcagataaggaaggagcgatgaatactgggtaggcagccaggagtccctgctgcttctggtggccttgtgggaggatgaggctgttggagtcagggatggagggtgctaaagtcccatcaagccacccctttttgccccactccttgggaaaacgtcatcaaatgttgggtcatagctgcaagaggatccagtcccaggttctaaaagtggccctcgtctctctggcgacctccattaaggggtaacgttttatttgttcgacctgatttcctccctggcaggggctttcttctcccaaatcactgcaaatggaattgcctggaaatatcaagtatcgattcacgattgttgttcatttcatttttattgtttggtaggaaacaaagacccagaaacacaacaggaacaattggagtgcctcagctccctcctcggaaggaggccagacgtatatttattgttgtcgtcattaactttttggggctgtctcagcattgtgtttattggtgtagtttgtcagtcagcttttgttttcaactgctttctgtcctgggagctgacaggtggcttgttttgtaaaaagccactttgattttgaaaactgctctattttaagtttctaattgcagcttttgtaaggaaactggtcattttgttttgctcgagtgggtaatgatgccgtggaccttggttgagagtgacttgcctgaatatttttttttttctcagactgaatggaagaatcgataccctgcacagagagagagcctctctcctggtctgggcttaattcactggtttatggcttcacttgcattctttgcatttccgtagaaatagactccctccttgtcttccctgtggggtgccttctatttactctgcagtctccctgatgcctggcacaccacactgacctccagatacccctgctccaggaagccatccatgatttccctgccatcatttttgctagttggtcactcccaggtctattgctgcctattttatactttaaaaatgtaatctctttatttctgtggtgacagattcaagaaacattagccaggatataaggtcatgagagtagggactgagttgatgttgatactgttgtgcacctagcttccaaaacagtgcctggtccctggtgggttatcagtagacatttgatgaataaatgagtgagtgaatgcatgaatgagtttgctgagcacccagtaataatagccaacatgcattaagcaccattgctagaccctgtgctaactgcttcatggcaactgtcctgtgaggtgggtactattatccccatttacacgggagaactgaagcttagaaaggtcagagaccggctgggcacggcggcttccacctgtaatcccagcactttgagaggctgaggtaggaggagggttgcttaaggccaggagtttgagacgcaatctctacagaaaaaaaaaaaaaaaatcagaaggtgtataatggggccagactctctgggctaaagtcccctccatgcactctatgtaagtattagattgttatcatcaagcgctttgccccaggtgcacagctggggagtggcagggcctggatctctgatgtcctgatacagaagtgagtaatactctatatctacccacctggggctcatagactggggtgactgggtaggcacaggaacctgggctccagaggggggtgcctggtctttttagttcaagatttctgccaggcagtggaacaggcaggcaggtggaccttgagtcctatgatgccctagttgggtgcacttaattagagtcactgggaggcatttgaggtacgtgctgtacccagaattcctcagcttgcacagcttccccttaccctttgtttctgattttgtcctcgtaatctcactgttttggggaatgaattcctccaaaaacaccccgtttcctgcctgtggagccaattaagccaagcaaggctgtacctttaattactgctgccctcatttgcatctggctgccctcattatagtgctattagcagagtgcaggggtcctcctgctggcccatcaggagtggtgcgtgcacagttgtggggccttgctttggtggtctttgctgccttctgggcaaaatgaaggatttggagtagacagcaagcaggcatacatcctgggccagaagcagcctgcggagctcatcgtggcttgccttaaattgtttctcaacaataaagttgttgaaaaacaatttgtgttttctttctccttattaaaaacccaaaattatattcattatagaaaattaaagaagatagacacaagagaaaaaggagaaaataaaatatcattgataaaccctcaagcactgttaatattttggaatatatttttccgagtaggtatggcactttgccacaaacagtcttgggagaagcattctctgcctgaagggctttgtgacccctcccctgaccctttccttgacacatggactttttatgggctcagaagaaatatgatggcacaaaaagcaataaatcattggtagggagtttgggaaaatcagatgaaggtacaatgtgagtgtacataacatcaagcacctgccagcagccagccacacgtgtgtccgagatgacaagaagtcgggtttgatgggcatgcaagctgaccactggtcttgtctgctccttcatgtcttcctaaggaaggtgagacagcattcattatgcagcctgtactgggaagccttatagcatgaagacttagattgtgggtgttggccgagaaagttctagctctgccctttgctagcagtgtgaccttgggcacattgcctgcccatgtgccctccccaccccacccacccctacatctcgttttggatcatttctgttgctgagtcttcaaattcactcgctttctccatttctgttgctaagtcttcaagttcattcatcttctccatttctagtgctgagtcttcaagttcacttgtcttctcttctgcagtttgcccacgacactttcatgaggccacagctagctgcaagggatgctgggaaacatagtctctttgttttccacctaggtggccaagcacccagcaaaaattgctgattttcttgctaaacacaaaaagaatgggtattaggggacacctgctgggtttcttttgtttttgttttgagacagggtgtcccttcattgcccaggctggagtgcagtggtgtgatcatggcttacctcatccttgacttcccaggctcaggtgattctcccatctcagcctctgaagtagctgggactatagcacacctggataatttttttgtattttttgtagagacagggtctcacgatgtttcccaggctggtcttgaactcctgggcttgagcagtcctcctgccttggcctcccaaagttctgggattataggcgtgagccaccatgcccagcccccaacacctgctgtttctgccacacttgtttgttagcagccactgtgcttttgatgagccatctgggaggaggttctggctttgctagagatacggtgatggggtcagttcagtggagacatgtgaaatatggtctctactcaatactttgaaacctacaggtggtagtgtgtctaacacctgtagacaggtagtacaggtagtatatctaccacctgtagtatgtctgccacccgtaggtgaggcagtgactcatccctgtttgggtgaaacaggattgatccttctcttaatgtttcagcagtaagatggccagctgcttttagtcccatgcttatttcccctgtaaatctagggtgttcttggagcatgaatgattggatttaccatgggcatatgtgctgtttatctgctattgatcagtgccaagtgaatttcattcaactggaattcagacccaggtctaaatcttggcttcatgctcatgtcatttggggatggcataactcagcctcatcctccatctataaaacgtggatggtaactgcctggcttactgaacagtagatccaggcttgtgagtgtaagttttaaactactctttctgtataatttggttcctcattgggagacaataaaatttttcttggtttcccatgacttgttatcacttttcccaccttttggggacaatttttagctggagagttccaattatgacagttgacatccaattaaatatgaattatggaaggctctattatttgcaatgataaaaaaattgtttggatatattacagagaattgatttcagtggaagtagacactggagcttgtacttcatactttgattttttaaataatttaatactttattagatttttaaaaatgagtaatatatgccctttataacaagtctagcagtgcagaggtacgtaaagaagttaatctctcccgatgctaccctttttagatcaccagaggtaatcacacaaatctactccacaaacaaacgtatatctattcttcctatttcttttccaaaaatggaattacagtctatgtcaggagttgggaaaccatggcccatgggcatgccacctttttaaataaagttttattggatcatggccatattcattcattatttccatctccgcttttgagctataacacaagagttgaatagttcttgcagagacctgtggcctgcaaaccccaaaatatttaccatctggcccgctgaagaaaatgtgtgctgatccctggtcaaccttgcttttttcaggtaagagtgtatcactgaacagtcaggaattttcctcctgatcaaaagatgtatagctaaatcattaatatctgcatattagagtccatcatgtggctatgctataatttttcaaatcatttcctcatagatggaatttaggttgtttccaggtttttatttattatatattatttatttttttagacacagtctcgctttgttgcccagtctggagtgcagtggcgcgacctcggctcactgcaagctccacctgccgggttcacgccattctcctgcctcagcctcccaagtagctgggactaaaggcacctgccaccagtcctggctaattttttgtatttttagtagagacggggtttcactgtgttagccaggttggtctcgatctcctgaccttgtgatctgcccgccttggcctcccaaagtgctgggattacaggtgtgagccaccgcgcctggccctgtttccaggtttttgctactacaaagaggattgtagtaagctgtctccttatatcctggggccttttggcaggaaggaggttcagaagtgctgttgctgattcaaagcgtgggtgcagcgtccatcatttggtttgcaaaccacatgttatatcgtcagttgtcatctttgatctacatcatcttttttttttttttgatgtaacatcttctataaaagtggttttcagtcctttttgactgtggcccacagtaagaaatactcttttaagcatacacatatgtgtatatagtcattgagacacaaccttctgggaacaatacttaacctttattacgtgcagaacgttctcatgttttatgtcctgttctactctgttttagcaaacgccacttgtgacttactgattattttcgctaccttgctaatgacatacaacctgtagtgtgaaggcagttgttgtgtagaaaggggtaatattctggaatgccgtggtgtacttaagtttgatgttcttgtctgttcgtgaagaccattcttccctttctctcttccttattgaatgtataaacatgttttctcttattgaaaattcatgcgtattttaacacataatgtttttctaattgcaaagtgacgcacagaccagtttcctctggaaatgaggattgtcctgtggtttttgtgtttcactgaaaagagtggatttaggggctttgctaccaccatgcagtgtagacatacctcttggccaagccaccttataggtgatttgtcctatcttgggtctggctcaatcactcgtacattgatccgggtacccctcactccacagccccccagcgcacacacgtgtacacacacgtgcacgtgcacgcacacacaccccaccggtacctgtcccggcctcaactctctctgtgtccctgactgagtgtcctgctttgttggctttggcccagacaagccttgaaaactgattctgctgttactccagggtctcttgcgacctgcagccttattttagtaagaagaacccccaccctttcgccaccgcgctgtgagttggaggtaacaagaatgtgtgttatttcacagagctgagaagcttggggtgcaggtgtggctggatccaggtgctcaaacagtttaccaggaagatgcatcactttttgtgttggttctgcttccagtgtaggcttatttcattttcagtcaggttttctttatgggagggagggagggaggaagggagggagggagggagggagagcaacagattcacaggcacaaaagccctgggaggttaggggcctgcataggacccagggtggcaggaggaagaggtgagagatgaactggagagacaggcaggggtcaagcaggcagactctgcgtgacctgctatgaggctgtgattttatcctcaggctagggggacctggtgaaaaatggaaagagtgaaatgacctgagccaatttgcatgtttcttccctgctcgtgctgatctcccctgcatgttgcgttgtttctgtgcacatcagagactggattctgcctttaaagggatggttacttttaggcacctaaaatatttttcttttcttttccttttaatttctgacattgtttgaatttaatgattcatattacgaattattcatgaaaatgatcttttaagcttcttataatagctgaaattatccgtcattagatgctgacagttcctgtgatgggtgtaattataaaaacatattcttaggctggctatattctgcagtgttaaaattacgcaaatgagcaagggataagaatagcagctgagtaggatggtcaggttttatgggagaaggggggtggtagcgctgcacattttctaaaaatgaataaatatgtgctgtacacattaagtacgtctttattacagtctgcctcgatgctcaccctctcttcattggcaggggagcaaattaattttagcgccctgaattgtttgtagttcttgcccatatatgaatcgtatgatgaagtttttttttcttcttcttcttcattccactcggcattttctgcgaggcacacgtagtaatctctggtacttctgaagaatggcaaacttggcactgatacgcagcaggctgagtggggaggggagagattggagggtgggggcagaaagccgggggtcactatctagatcactgagcctgggaaatcaggccctcgtcttgttcctgtccaaagggtgaccagatggaccaggtgtggtggctcagccccgtaatcccagcacttcgggaggccgaggtgggtggattacctgaggtcaggagtttgagatcagcctggccatcatggtaaaaccccatctctactaaaaatacaaaattagctgggcatggtggcacacatctgtaattgcagctacttgggaggctgaggcaggagaatcacttgaacccgggaggtggaggttgcagtaagccaagatggcgccactgcacaccagcctgggcaacagagcaagactgtctcaaaaatgaacaaacaaaaaaaggatgaacagatgggctattcatggcttatagtgaccagcaacttgggtttaactttggtggctttgtggggaagtattgggaagggaaggactgaacatccgtcgcatttgctggaaaattgtggcgcccagggccctgcatgcgttggtcctgtctgcctgctctccagcgtgtctgttgaaaatgccccaactgcctcttccccgcatgatcccgtgcttccttgggtgcactaaggaactcccaagagaggggttgtttattccagggcactgtcactgaccgtaccatctcatttcaactcatcagcagtgacgagcaagtgagctctcccttctccctgccttggaactggacctttccacgttaggtagagaggatgataaagaataaaagctaaaatttaagtagtgctaactccatgccgggcactgtttgaagatctgtacattgactcattgaatcgtcacataagcctacataggtaggtgctattacgatcttcattctgcagatgcagaaacacagagagcttaagtcacttgcccaaggtcacagagcaaattaggaaacagaaacaagcctggtaaagttacattgatttctgatgggtgcaggggtgagggtgggttgagggggttgtatagtgggagaaatggttgatctgcccactgaaacattctcaaacaagcgggcttgaaattgatgtcagcccatcctctaagcctctcctttccttgttagctcttccacagtggacatgcattgtttttataagggaaaaagaccacttgataaaagacaaccaccagcttgtatgtttacatcgaatggacattcagttggggcagcttcccgctgggcttctggtgcaggcaggaagaagagtggggctggctacttcatatctgggtgaagcttcacagtttgcagagtgctgtcttttttctttgagacagagtctctctctgtcacccaggctggagtgcaatggtgcaatcttggctccctgcaacttctgtctcctgggttccagcaattcttctgcctcagcctcttgggtagctaggactacaggcacccgccaccatgcccagctaatttttgtatttttagtagagatgaggttttgccatgttggccagtctgttctcaaactcccgacctcaggtgatccgcccacctcagactcccaaagtgctgggattacaggtgtaagccacgacgcccagcctgcagagtgctgttttcatttggatgctttgacagccctttgaggccacaggtgtagatattattctcactttgaaagtggctaaactgaggctcaatgcagggctctgcaactggcaagtggcggagtgggcaactgagtttaggtctttggattctaaatttgggactctggctcttgtctccttttgacactagtgatctgaaatgcgtttcctcagtgtgagttgtcattatgagtagggtttctggagtcagaccatgtaagggtgaaccccaatgctaccactcagcagctgtgtgatgctgggcaagttacataccctccctgggcctcagtttacttatgtgtaaaatcgagattatactagtattaggctgggcatagtggctcacacctgtaatcccagaactttgggaggccgaggctggaggattacctgaggccaggagtttgagaccatcgtggccaacatggcaaaaccctatctctattaaaaatacaaaaattaggcttcgcacggtggcttatgcctgtaatcccagcactttgggaggctgaggagggtggatcacctgaagtcaggagtttgagaccagcctggccaacatggtgaaaccctgtctctaccaaaaatacaaaaattagcagggcgtgggggcatgtgcgcctgtagtcccagctactcgggaggctgaggcaggagaatcgcttgaacccaggagatggaggttgcagtgagccaggatggcgccattgcactccagcctgggtgacaagagaagaaaaaaaattcaggtgagagtcatgtgtacttgactgaattgaaatctgttgactgtgctgctgctttgccctgtgggtgggcccagcgcttctgcatgtgatgaggcattgagacctagaggggaccttttcatctgtcatcatggtggctgccatgtattgagggcttactttttgccaggctgttggcaagcatttcatggccagtggctcgtggaatccacgccacagtactttatgatacgttctgatccttatcctgttggacatacgaagaaacgtagcctcggaggggttcagcagctcattgaagcccatgtggataatggaggcgagagttcaggtggatgcccaggtctcctcactccagagccacggcttctacctcttgccttgcccgtggtagccttcctcccctagccagcatgcagttggtattgcagagctgggtggaactctttttccttttgtttctttctcagcatgtaaaatactactctacttgagtagtaggttattggggcacctggcatcagccttcaggagtcgagtagatgtggtaaattctacatctcccttgctccctgcattcctccctctcctcttccctttttcctttcctctccttcctccctccttctttctctctccctctcaatccttattgctttctccgacaactgtttttagagggcctgccataggccaggccccggtggatgccatgatgcagacctgagacatggtcactccccctggggctcccagcctggagaggagggagtggtgactacaccacaggacgtgtttcttaacacggtgctgaggacatccaggtgcagctggagcaccgtgtggagctcctcacccattctagatcaaggaagggttcttggagaaagtgacatttgatcagagggttgaaggttgagtatgagttcttcaggtcaaaacagggaagtgagatggccaaagctcactgaagaattctaaagagcctacatgtgcaaaagcagggagtattgttgaatttaccggtggatctttgtctaggcaagggtttgtttttttgtttggatagtaagcaggcacaaaaccagatagtccaccaagacaagcctgatggagtcccagctctgtgtccttttgcatgtgtttacagtaatgagcccaggcaaacgtgacagggttctaggagcaggatcagttctcatgaactgtggattcagatctgtggctgtacatagggccagctcagaaccaaacctgagcattctcccatcaaagggtgaagactcttggcttcatagatgctctgctctgttccagcaagggtgggatagttgataaccttgcaaaccagcctgtggatcttgacctcctcttactttagtcagaaatctttctaacatctgttattctaacaaacagtgcctttggtattgattaatattgattaatatcaaaggcattgatattaataacagtatcagtgatattaatatcactgcctttgatattatcttttgatcagaggtaaagacagctgaactcttaatgtatctacctttaagggacatcttttttacttggctctaggtgtatcataaactttgtagtaggcatctggtaacggcttggctgtgtccccatccaaatctcatcttggattgtaactcccacaagtcccacgtgttgtgggaggatcccggtgggaggtaatagaatcatgggagcgggtctttcccatgctcttctcatgatggtgaataagtctcatgagatctgatggctttaaaaacgggactttccctgcacaagctctctctctttgatgtctgccatccacgtaagatatgatttgctcctccttctgccatgattgtgaggcctctccagccatgtggaactataagtccattagacctctctcttttgtaagttgcccagtcttgggtatgtctttatcagcattgtgaaaacggactaatacagcatccaggtcagcccaggtacaagttgtaaggtagaggcagcatggaaagttaaaggcctttctggcatcgcatgaagatttgaggagctgatacagggatttgaccagatctcagcaaagcccaaacaagtcttgttcttcctcatgtgttaaaaaaatgtgttgactttctagcatccagcccacattgacttgggcaccctcaatgtagttaactccacaataatacactagagttactgaagaggctctcctgccttttaactaaccccagtaagacagatgaagcaattgagttctgtgttttacactgggaaactagccagcatccagccctcatcctccggcattctagcaaggggcaaattcatacaaggtactaaacccctcgcatacaaatgacttctctgttgttccactctttcctaataattaatcctagtgatgattaatcttttcgaacttacatcatctgaagaacggtcgtgttcgacattctggagatctgaaaagtgctctatgtgtttaatgttaataggcagccactagaaaggtgcagaataaatcgaattaatattgtctgggagtttgggatgtcgtaaccagcagaggcccaaaaatgaagtggatgctggcagaaggcatgaatcacctccctgcaacaggagaatgttcttatgattttttaatgaccccctgaaaatgaatgtgcactattaaggtaaactgtttaaaaattaaggcttttgtaattctgtgagtttaaaaggaggagagagagggaaagagaatctatagactgtatggttgataggaggcagcttgtggagctgaaggggtctgcatggagccccaggttctctgtttattctagaaagagggtttgggtttccaggggagctgaagggcgtggactgagccttcttttttttttttttttggagacagagtcttgctctgtcacccaggctagagtacactggtgcaatcttggctcactgcaacctctgcctcctgggttcaagcaattctcctgcctcagcctcccgagtagccgggattacaggtgtgtgtcatcatacccagctaattttttgtgtgtatttttagtagagacgggtttcactgtattggctaggctggtctcgaactcccgaccttagattatctgcccaccttggcctcccaaagtgctgggattacaggcatgagccaccacgccccactgagccttcaggttttggtggcatttatgtaacacgtctactggctagctgattccatcttcaggcggcagggtctggctaccatccctaatcgagaccggatttgaatctatctttgaaagggaaatttggacttggccaatgctcagataagttgggattatgggctgggactgtggtgaagtgtaggatgaggctggagactccctgttggggcttttgtacaagccagcattgctgttgtcatgcagtgcatctgggggtctggcggattgggtgctgcttttctggggacatagcagtagctcttcctttctccccattttacttcccttgtcatcccacagagctgaatgttccgatcatgaccgtgtggttaggaacagccctgtttagcgcatttctcaccttttccttttcctcacttcttctcttggactccttcccccaacccaaatgatctgcaccccagtgacaacgtggagtggctccgcggaagatggatgatacacacttgtgatgttgctcatgttttatggttaactgcctggaattcttcagagttcttttcatagcagttgaaggctgaaaggcacacagaaatgaccaactcaattctgtcaacatttgctgagtgttctttttctgtgtcaggccctgggaactggagcttatcttacacaaatctatggggggaaagtaagttctctagattcttgctattcaaaatgaggtctctgaggccgggcgcggtggctcatgcctgtaatcccagcactttggcgggctgagacaggcagatcacctgagatcaggagttcaagaccatcttagccaacatggcgaaacccagtctctactataaatacaaaaagtagccaggcatggtggctcgtgcttgtaatcccagctactcgggaggctgagacaggagaattgcttaaacccaggtggtggaggttgcagtgagctgagatccagccagtgcactgcagcctgggcaacagagcgagactctgtcttaaaaaaaaaaaaaaaaaaaaaaaaaaagaccgaagtgaggtctctggaccagcagtagtggactcgtcacctgggagcatgttagagaggcaggatgttgctgggctggcccacgcctgtaatctcagcacttccagagacttaggtaggaggatcacttcagcccaggagttcaagaccagactgggcaacacagttgagaccctgtcaggaaaagaaaaggagaatgtcagaccttaccgtctcagagtctgcactttaacaaggcccccagccgagctgtagacacattagtgttagaggcactgaaatgttctcggtctctgtagagagatggacagatattgacaccatactgctattctcccttccacacccatggcaggcatcattaatcaaacaggatacttttccccaatgatccctgtctaaacttccagcacgttctcagcacagtgttatagatggccacttccagttggtccgagttggcactcgaggtcaggttcagctgctttaccttgcctccagcacagtccatgacagcagcagcatcctgctctctctgcctctgctctggtcactcttacccctttctttacaacacagagctttcttttaaaactacaaatatgctcaagatattttcctgcttaaaacccttcagtgacttcccgttgcaattaaaatgaaatccagatgccttaccatgacttgcaaaaccctgcctgacttggccctgcccaccttttcaaccctgtctggtgcgcagctccccaacctatgctgttctctgcctgtatcacctcatttcagttcctggaacaagccgtgtttttcccgcctcagggctgggctgaccaaagtcaccgtctcttgagttttcccactgtccacgtgaaaaagctaggggcacagagacttgatttgcctgaggccacatggcgagtcaagagccagagggacttcattgcaaagctggtgatgcggggcaggctgcctccctgcagtgaccacacgagggagcctccaccgagtcttctgactcctgctgctctccctaagtgagtgtctagaatgcgcttttctcccccactcccaaatgccttgcagggcttgcttgccctcattccttcacacagaccttggacttgccacctcctcagagagccattccctggcctgccaggatgtaccttgcccccttcagcattccagctatgttttatggagcacttgtgacaatttgcagtatgtcttatttattcctggtttgaacttgttttcggtttctccactagtctgtaagctccctggtagcaggattcctgtttgtgttattggcctccataactaaagcaccagcatagtacctggcacatagtaggtgttcagtaaatatgatttggatgtgtgcatgaatgaataatggaaatggtcaggccagtcctaggattttaggcctggtctggatctaaatgaacatctaaccaatttccatgtcgtgtatgcggctaagcgaagaaaaagagtggtttcatctccctgatgtcaaatggccagttggacccagcatgagtttttgccaatgtagagatacttttgtgacttatgtccagtggaccacatcagatggccccaaataaaccttcttcctaccatttttcatcttttacaattccctttgaagaatggtggggttttttttttttgactgtcacatgatgtttaaagaaaaatcaaggaagataagttcctgcattcttcaaagatctaccgtcaaagggatttacctaacaattgaagtagtgtagagggttgctgttcttggggtagtgccttcagccaagtcaaaagggatgaactgagctgacgctgaggttacctctgcagtccgacctgtactggtcaactgtgcttggacctagatcactcaggtagctcagctctgtctcatactggtctggttggacttacgagataattcagaggaactgctttcattctttctaggacagggttcagcaaactttttctataaaaggctggatagtaaatatttttggctttgttgtccagatgggtctctgtcacaactgctcagctctgctgttgtagcagccgcagacattgtgtagatgagtgggcttggctgtatgccaataaaactttatttacaaaacttgcatcagcccggatttagcctcagggccatagtttgtacacgtctgttctaggagtgtttaaacgaaaacaaagaaaatgtaaaagacagctttcattagttgtcaaagtttgcctgcaaactgtcttgaaagcttctgaagctggtccttggactcaggagcttgttcttaaacttgagaaacatcattgtctgacttcccgtttgggcaaagagtcaagccatgatttatcagttgcaataaatagcttgtatttttccaaatagacaatcacgttctcttcattagcaacccatctgctggacctgcagtagtactgaggaaagatgccttggtaaacacagtagcaggattgcaaagtgcaaacgaaccctcttgctttggtgacagcttgtttgtggaaactggaccattctgcaaatgagttcatcgatcttgcctaaatactggaagggcctgttcaacattaggggaaatgccaatgtattttgagacagatcaaacaaagctgcaagtggacaaattttagcatttgttttttaacgaatgagcagatggtaggccttgaatgccccaaatgcttatctttgagttaggttggggggaaaatagggaaaccaaatccaaagtgaatacgttaatactgtgccatcacctagaaactatttgggctgcacgttggagttgcaattgtgactcttaagaataaaaatgtttctcccttgtaataagtcgtatgtatgtatgtatgtatgtatgtatatatgtatgtacttactgagatggagtctctctctgtcacccaggctggagtgcagtgccatgatctcggctcactgcaacttacgcctcttgggttcaagcgattctcctgcctcagcctcccgagtagctgggactatctgtaggcatgtaccaccacacccggctaattttaatatttttttattacagatgggatttcaccatgttggccaggctggtcccgaactcctgacctaaggtgatcctcccacctcggcctcccaaagtgctggaattacagatgttagccaatgtgccctgccggtaataagtcatttaaacattaaactgtctgattaggaaacagaggcacaggttgattaaataggatgtaaaggtccctggattgggttgtaaaacttagtccctttccaccataccatccagctcactagggaaaatgaggaaaacagaacttcgtttaaagtattttccctctctgtagacactttcttaaaaacataattgaactcctgctgtgcatacaattttgtttgttgctttttaccccacttaatcgtctatcacaaagccttttctatcattatgttgactgcattgctgtaatttgtaacaactgtgtgatattccagctagtggatagaccagagttttagtcaatttccaattgttgggcctttttaaaaaaaaaacaaaaaacaaaaaacaaaaacaaaacttttactatactgtaaaatgctgcagggaatgccttttgtgtacagaatttccccatgtttctagttattttggaggatgtggtctcataggcagaattgttgaatgaagtgctaaggtttttctgacttctgtttcgggtttccatattgctccccaggattgtggccattttaaagtgtcaccagcaaacaggccctcttggccactctcaccagcattcataactgttgccattggaactccagtaggcaaaaacctagctccttatatttgtaattcatgagtcactgtggagatggaatacttacttttttctgtgtttatgaattgaatttctttttggtgaataatcagctcatttccttggcctatgtgtttcaggggtttttcctctgggttatgtgaggacttggtatcaataaagatgctggccctttgttttaatggattcgtaagttctcatgtctgggaattgtcatgaattgtcctgcccttctggttgtgtgccccagtttaggtttttagcagttgttgtgatttaggcacttggacagcccatattttgaggatgaaaccttcaagtctgtttgaggatactttaaagggcttatggccattaagggggaagatgcatttgtaggccatgttagtagatgtggtttaaatgcttgaattggctgggaaggtggctcacacctgtaatctttgaactttgggaggccgaggtgggcaaatcacttgagtccaggagttcatgaccagcctgaccaacgtggtgaaaccccgtctctactaaaaatacaaaaattagctggacatagtggcgtgcgcctgtaatccttcggagactgaggcacaagaatcgcttgaacccaggagggtggaggttgcagtgagccaagatcgtgccactgcactccaggctgggccacatagtgagactcggccagaaacaaacaaataaatgcttgaatcgtggcttttgtttgctttggtaaacaaaggaagagttttcgtttttaatctttcagtgggcttcacggtggagtagtggaaacgttggggaatctggctattcatgagagtgtgattctccccaaagccaacaaggacccttttccttttctttttgagacagagtctcactctgtcacccaggatggctgcagcctagagggtgactgtgggcagaagatgtcccctgagagggctggaaaggagatgacacacagaagtcagcacacattggtccttcaaagtatcctatggagacacctctgtactcactatcagcctcaatgctgagttcacagcccacccagcatgggcttggaggggcatggaggctggttgggggaggtggtccacccggaacttgtcctcccaagccccagcctggcaagttgtagtcttgggagactgaaaccctgaccctcacatgcaagtcaccacagttctggatgagagatggaagagcagcttgatttgctggaaatgccttcctctttgtcttcatcttctttgtcttctttgtctttgtcttcctcctcctcctcctccccctattcttcctcctcctccttcctccctcctccctgcaaaaacatgtagtcagtccaggtacccatcaatggtagactggataaagaaaatgtggtacatatacactatgggatactatacagccttaaaaagaatgaaatcttgccctttgcagcagtatgaatgcagctggaggctgttatcctaagcaaattagtgccccaacagaaaaccagatattgcatgttctgacttataagtgggagctaaacagtgggtactcctggacaggaagatgctaacaatagacactgggggctacaagaaggggaggaagggaggagcaagggttgaaaaactaccagttggatactatgcttactgcctgggtgatgggatcatttttaccccaaaccttggcattatgcaatatacccatgtaacaaaccttcacttgtacccccgaatctgaaatgaaaggtgaaaaaaaccacacaaacaactttattgagatataattcacatgccatacaattcatctatttagtgtatgatttaatgatttttagtatattcatagagttgtgcattcacaacattttagaacattttcactccctcacaaagaagcccattttcctgagcagtcactctccaccccagggcctggcaagcaccattctccttcctgtctctgtggatgtgcctgttctggacacttcatatcagtggaatgatacagtgtatggcggtttgtgataggtttccttcatttagcataaggttttcaaggtttatctacattgtagcatgtatcaggatggcattctcttttatggctaaaacagattttactataaggatatgccatattttgtttaccctttcgttagtcgatggacatttgggtttcactttttggctgtgataaataatgttgcaatgaacattcacgtacaagttgtgtggacgtgtttttcatttctctcgggtataacctaggagtgggattgctgggtcaaagcggctgtaccttcccaccagcagtgaatgaaggttccagttattctaccatgtcctcaccaaacacttgttattgtctgtcttttttttattgtagccatcgagtggatgtgaagtggcaccttcacgtttgcaaatcagtggtttcaatttgcatttccctgatggttgatggtgttgagtatcttttcattctacaaatggcttactggccatttgtagatcttcaaagggtgtcttttcaaatcttctgtccattgcttaatttgtttagttgtcttttttattgttgagttgtatgagttctttgtgtattgtggatactagacccgtatcagagatacgtgatttgcataccttttctaccattctgcaagtttcttttcattttctcgatggtgtccttgaggcatacctgtttttaattctgatgaagttgaattcatctattttttcttttgtcatgtacttttggcatcatatctaagtttgtctttaaagcagtgtttctgttaattttaggcttcaaaatgatttgatgttagagctgagatgctgtcggcttcagcccagaggttttgggggttgttggttggagagttgttcattccctctctggacttagcactgcattgtgtgtttccccacctgaaattacttagggctatgtccgtctgcctactggcatcataggcactcagaagatacccgctgaatggatggatgatgggatgatgacttcctgtttgggtctcagctccctaccttacacgtggctctcattctttgcctttatgtttctctctccttttcacccatccttctcttctctgagtgtgtgtatgtgtacttttctccctcattccttccttcctcctttccctgtctctctctgtctttggctttgtctctttctcttggaatctgtctctgtcctgcccttattctgtccctctgtgtcttttttttcatttttctttaactttttcttctaagctgttgaccttatcagatgaactttgcagtcagttggaaacaggctcacttgctcactctttctttcctttctctctctgtccctggtgttcagtaagtttagagaagaaatgcacaaactattgagttccccttcaccaacgtgccccagagttggcagaagtcagagaccagctggcaccaggcatcccgcagtgctcgtgttttcagcttgctgtgtatgaggctgtcccctgggcctgcggtacttaatttgaaatttggttaggaagcggcagtgatccattttcacatttggaggtacatatttggcatgtcagatgggagcagtacagacagatttttttttgtgcactactgcttgagtttgtcaggagttttattatggaaatcactatttctgcctttccattttcccaagttactttcctatattgatatattttcacctgcctaacattggcatatttttcagggttcttgctttacgattcagtagcaagactcaaaataacacagaggaaagaagtgaaaaaacctctgggtaaaaaaaagacttgcatccacattttttttattgaaaggaaacttcatcagtgttttgaacagaaaacttaaacacaataaaggtggatgaaaacatgggttgtaaattgtgtgtgtgtgtgtgtgtgtgtgtatgtgtatgtgtgtgtgtgcttggagtgtagattctgacataaaaatcacagttcttttggcagtgtatagaaaccttaggaaactgaatggtaacaggtaaagattcagaaatgaatagcaacttagggattactggaaaagtacaattttctgtttctgtaggacttctttctgctagggtaggggacggaataaatgttatttaaaactctctgtttccttcctgtcctctctgtctcatatatgctgctcctggttgcatagatagcccagaactgctttacgtacttatttcccaatactatgggctttgattttatatctgttttcccacatcaatctgacataaatctcatcaaatacccatccactgttgccccaacagttaatacatcatctggttgaaccaaaagatcaaactggagaagggaatgcggtcactgttagtcttctagtgtctattttcaaagccttcatttgaagacccatggggagtctgaggagggcatggggcaggggagaagccaggggtcttgacccttctgttgagggtgacctctttttgtactttcatttctcgctattcttcttcttgtactttataccacagcaatgctgaactacttgggattaagcaaggctattatttactgcaatggttggtgcctagaagcccttttcccactacgtcttctctgttgcatgactttccgcatccctgaagacttagttcgaggtgtcacctactctggaaagactctgtgggtccattgaatgctattcttcctcctgtcatgctgactgctgtcactaccgccatctgtcccactgtgttggaaaaccagccacaggctaccactgattgaagactccctatgtgccaggtaccacagtgaacactttgagatgctggcgttcctctttcgcatctcccttggccctgtgctgacattagtctgagcactcgtcacatgcttcggtgatcaagcatttggtcatccgtcctcccctagtggattctgagttgcttggaggaaatgctttgtaccttcttcctgccttgggaactgtgcttgacacgtggtgaaggtcagcaagtcggtgctgcatgaatggatggagaaagccgggtggggagtaaaggcactgggcagcatgagggctttcctggaacttgaaggttggtgcaggcttggacctccggctggctgggtcattcttatagaatatcttgggaaactgactctcagtctcacagtaacttctcaggaatgtgttggctgtttgcagcagttgtacctgggggcaggcagatgccgtgccccagtctccagagtaggcaggtgggacgtaggacaggagggtgcgaagctctgtccacccccgactcctcacccccaccagcataaaacagaaaaagggagtttctgaagcccagcggtgtttcctctcatgcacagcgagaatcacaaagtgtgtccactgaagggcctttggggaggtggggagctgtgcctctgtctgggagtgggcagtttcccctgctttatgcgcttatctctaagcctcccagattttgcaattaaggacatttcacgtttttcgtgtctctctgaccatcatgttgctgttctgttgtgacagccatgcccctggataggatttagatggggcctggccgggtgcagtggctcacgcctgtaatcccagcactttgggaggctgaggtgggtggatcacctgaggtcaggagtttgagaccagactgggcaacatggtgaaacccccgtctctactaaaaatacaaaaattactgggaagtggtggcaggtgcctgtaatcccagcactttgggaggctgaggtggatggatcacctgaggtcaggagtttgagaccagactgggcaacttggtgaaacccccgtctctactaaaaatacaaaaattagtgggaagtggtggcaggtgcctgtaatcccagctacttgggaggctgaggcaggagaatcacttgaacccgggagatggaggttgcagtgagctgagatcatgccactgcactccagcctgggcaacaagagtgaaaactccttttctaaataaataaataaataaaagatggggcctgaggtggggtcagatttcatgatgcagtggccacagaagcaacgacgctggcaggcttttgtgacatgcatagcagctgaggagaaagtaactgggtgtgggggttgaggttggataagggtgagacctacaagccagagaagggagatgaacctcggtggaggggcagtgggcaggccagtggcctttagaccttttaaaaatcattgtggtaaaacatatgaaacctaagatttacataagatttataactgtaacagttgtaaaaaaaaaatacccagaaccttatttgtgaaagggaggaaattaaggggtaagaaggccttggcctctccattccatggcagccttttggatgggcacttttttttttttttttgagacggagtctcgctctatcacgtaggctggagtgtactctgggaggatcgcttgaccacccaggcatgatctcggctcactgcagcctccgccccccgagttcaagcgattctcccgcatcagcctcccgagtagctgggattacagccacgtgccaccatgccggccaatttttgtatttttgtagagatggggttttaccatgttggccaggctggtctcaaactcctgacctcaagtgatccgcccgccttggcctcccagaatgctgggattacaggcttgagccaccgcgtccggccttgaataggtacttgtgaggaacgtcagtggggaccgcaaaccgctgcattgcaaaccatgccaataatagtgttactggttctttgggtttggaattgtgcttggctgctggtaacagagatatggccctggtggcttaaatgaacaacgtatctttcctagaaggtcacacttaggcagtgcagagctgtcgagtgtctctgccacagtctagtgtcctggtccactttatctttctgctctaccatccttagctgtggctcttatcctcaggttggtctaagatgcctgttgaagctctagccagcatgtctgtgttgtaggtagcaaacaggagaaaacaggaaggccaaaaggactctcccccgctaactgtccttcctttaaggagctttctcaggagtctcatctcacaacttgagtttacatctcactggccagaacttagtcggtggcaccactttgatggaaggggcgtgtgaagtgtagtcttttagcttggcacatggcctttctgaatagggcttctgtgatgaaggaagaaggaggggatggatgccaggcaatctgtcctggttgtagaggtagtgctggaggtagctgatgttcattgcgttcattgtttgttgccaggaagtgcattctgtacctgacatgtattagaggtggtgtgtagtgaccagctggagcccacgtctctagcaccagtgaggatttggctgatgagcagagtttttcagtggtcagaaccctctttgctgggtcgtatgtagcctactggaccgtgaactccttgaggacaggagtatttacttttgtctcccaaagcacctggctcagtaccaaggaaatgtcaccaaatgttggcttatttaaaccaaagctatttctattgaaaactacaattaaaaaatattttttggcagggcatggtggctcactcctgtaatcccagcgctttgggagtccaaagctggagaatcacttgaggcaaggagtgagaccctgtttctacaaaaaaaaaaaaaaaaaaaaaaaaaaaaaattagtccggtgtggtgatgtgcacaatgtggtcccagctactcgggaggctgaggcaggaggattgcttgaacccaggagatcagggctaccgtgagctggtgtcatgccactgcactccagcatgagcaatagactgacaccctgtctcaaaaaaaaaaatcctgattataaagaaatataagtctattagaattttttaaagtagcaccaggacagaaaaagaaaaatcacttgtaatctcatcacccaaaaatagccactattgaagagatttgaagtacctcttcccagtcttttttatttgtatttagagtgtctgtgtaaaacacatttagatcattctaggtaaatcattttgcattctctcgtttcacttggtatcatatcacgagcagttttgtgtctttaaatattatctctgaatggccttaacggccgcatgatgtctctgttaacttcccacggctaggcactgaagttatttgttgttattactgccatggtgatctttatatccacattttagtgtaggattctgattatttctctagggtcagctcctgtgaagagaattgctgggccctttaagattcttggcaaagactgtcaacatgcttcccagaaaaacatgtattgacgccagctgtgtatgagtatgcctgtcaggcctcaccctccttggtacggggtattgtcattttagttgctaatttgattgcaagttttattttgtatttctactgtgtttcaatttttccaggactattgaccatttgttgttttgtttgctgtcagttttttagtattgagtctataacgatcttgattttttttctgtcggtttttgtttcttttagatgttttttgatgcggctgtgcttcttacttataaaatagcatttctttgtcatttctttttttttttttttttttttttttttgtgagacggagtctcgctctgtcacccaggctggagtgcagcggcatgatctcagcttactgcaacctctgcctcctcccaggttcaggtgatcctccctcttcagccttccaagtagctgggattacaagtgtgtgtgtgtgccaccatactggactaatatttgtatttctagtggagatggtctttcaccatgttggccaggctggtctccatctgctgacctcaagtgatccacccaccttggcctgtcaaagtgctgggattacaggcgttacccaccgcaccttgccatctttgtcattcttgtggtaaatctttttcttttactttttctgcataattattttgacccatagtggtttttaatttttacctaatcaaatccggtgactttttttgtgtggaatttcttccgtttgtagtatgcgtgattgtgggaacaagtttctgcttgcttttcttgaaaaaattagctatttgtgtttgctcattttctagataagctttaaacctcgattccagtagaaaaataattaaccgggattccaattataattttttaagctgcctaggttgcttttaagaggagtaatgagtattgagtaaaattcttgtctggcattggcctggtagtctcttagaattcattgttgtgaacaaaaaaagaaaactggcttaaaattgaagcaagaagccctgaaaatcactgttttacgttaaaagggggtttattgattgaattaacaaaagttttgtcttgatcagacaatggcatgatcaaggacttggtgttatgtggacctagtctgtctctgtgttggtctgtctgtatttctctccctggtctatctttttttttttggagatggagtctctctctgttgcccaggctggagtgcagtggcatgatcttagctcactgcaacctccacctcctgggttcaagtgatcttcctgcctgtcagtctcctgggtagcggggattacaggcacctgccaccacacctggctaatttttgtatttttagtagagatggggtttcaccatgttggccaggctagtctcaaactcctgacctcaagtgatccgcctgccttggcctcccaaagtgctgggattacaggcatgagccaccaggcccagcctccctggcctatctttgtttccccatctctttctctcaacactagtttcatccatgatgggtccatcatcagactgttttctctctccttatggctagaggatgattgcagcagttccagaactttctagttcatgttcagtgtggaaagggggctcctgcctctgtgccaggaggctgtgctcaggttcctggggttgcgccgactccagcatgctcatctaagaacccatagctggccaaggaggttgcccagctctgagtggccaggcccaagtcacatgccactcctgaagctgggttggagtcaggcctggggtaaagtcagtggaatgtgagagctggggagaattggcttccccagccaaaaatgggtgctctttcccagaagttgggtgtatgggggtttaggtttctgatatacagtaaatgttaataataattgcttgtgagcggtggactacagccttgaacccaacttgtttgacttcttgggaggagaaggaagctaccagtgccctgattttatttatttatttatttatttatagtggcattagattctcataggagaatctaattatatataataatatatatatatatattttttttttttttttaagaagaggagttacattcaatcctcatcttgaatcctgtgagtcttgatgttcatagtccacttgtcttttatctggaaagtggccatctctgtctgtgagtggtcggagaattagtcggctaagtttcctagagaagagcatccctcccaggggttcagctgtgtctgatttggccggctcttttcttcttcttttcttcttctcttcttcttctcttcttcttctcttcttcctctcttcttctcttcttcttttcttcttgtcttctcttctctttttttttttgaggcagggtcttactgtgtcacccaggctggagtacaatgacgcaatcacagctcactgcagcctcaacctaccaggctccagcaatcctcccacctcagccccaccctgagtagctgggactgcaggtgcccaccaccacgccttgctgggtttttttttgtatttttggtagtgacagggttttgccacatagcccaggctggactcaagcagtgcttccacctcagcctcccaaagtgctaggattgcaggtgtgggccaccatacccaaccattccccacccccaaaaccctaccgcatctctcagttcagcaggagcctcatctttggagaggcccctggctgtggaggctcctggggagtggcagttcacatgtccgtctttcacgtgtcctggcctgtgggctggaataatggaactgtgggtggcacacagcagagacactatttgtcttctcgctctttctgtatctttcagtgcaggcctggcatctcttgggcacacaccgattcgtgcatgtagttgacagtgaataagctaaatgtgcatttgatgccactctagggcgtatgccagatactgggttaggcttcatgtgctccaggtgaccaaagtctgaccccctagcctggacaggtttcctgtctggccctcgctgatctctgaacctgtgccacttttgttctgctgccctgccattcctctcttacacacctgatgtctcctgcagttggtaagtatttgatgtctctatgatgaatttattaatagtttaataagaacacattaggctcagggactcagtaccgtgtgagattgttagctaacttttactagatcctgctggttattcttgatctgttaggacagcagcctccaaccttttgggcaacagggacctgtttcatggaagacaattttttcatggaccagtctgataccctattttggcccagacattttggggcatgtaattgggttgaatagttgtatgattgggcttcaggtccatccatttagaagacatcagaggctggattgcaggcctggttctaccctcatgggggcctggtgggctcattcaccctctcagagcaccaggtggcttctctgctcagacagaagcacctcctggtgcacctgcatcagagactcatgcggattaagtagggtaataactgttaaaactttgtatctttgcataagtccattcagcatgtctggaaccattgtcaaatgtcatggagtcctttgtggctctggtagaggttaggttctcaccaataaaattactctactggtggtgggggtggtggtttcaagataaaactgttccacctcagatcatcaggcattagattttcacaaggagtgctcagcctagatcccatgggtgcgcagctcacaatacggttcatgcacctctgagattctaatgccacctctgatctgacaggaggtggagctcaggcggtgatgctcactcacccgccactcaactcctgctgtgtggcctggttcctaacaggccacaaccattacaggtctgtggccttgggggttggagacccctgccttagggtgccaaagtggagtctagaattctgagagtggaagaaaggactgttttttccttgataaaatcatacaagccaggcacgatggttcacatctgtaatcccagcactttgggaagctgagatgggaagatcacttgcagtcaggagtttgagaccagcctggccaacatggagaaacactgtctctaccaaaaatacaaaaattagctgggcatggtggtgcatgcctgtaatcccagctgctctggaggctgtggcaggagaattgcttgaaacctgggaggcagcggttgcagtgagccgagatcatgccattgcactccagcctaggtgacagagactccatctcaaagaaaaaaaaaaaatcatccaaatcacctatgcagaatggagggtttcttgtgtgcttcctggaagcaaaattatcttttcagtactgatcagagccctggtatctaaatgaaggatggtttgccactgtttgagaaacacttcagcatctttaagctggagggagtggtgtggatgcttaagaagaagatccctggttaatgctcaaacacagatgtgcgttgctggcagagtcacatttctcaccatttgttactgctacttaatttgaaatgacagttttgtgttctcaaaagaacagtcatgtttctcctttcagatttgttttggcaatttattagcagatctaattataatatttgtttgatgaagcgtcaggtaggagccacctaagtggtggtagcatcgctttaaaaataagtctgaaagggcatagttttcttacagtgatagaaaacattgattccccgcccccctaacaaaaattactcctaaatggtatatttaaattgaacaatgggaagatttttgttgttggattccttaagtagtggttgagagcatatgctctgaaattggtcgttcttacagcggaatcctggcattgctccctatgagctgtgtgacctcagctgagttatttaacatcccccagtctcagtattttcatctgttaaatggggtaatgagaagctccctcacaagtttgttgaggtgttacgtacatgatccatatatttaacatgcggtgacaggttatgtaaagcgctcagtaactgtgactgctactttcatttttgacaaacatgtcaaagatgacatgtttgaattcatgtcatctgcttgggttttgaattatagtgacaactgcctagatttttttttttgtaatgtaggagatgctgacttcttctagttatatttatggggcagaagtctgttaaacatctttaaaattagagtgattgtagtttatttatttattttttcctttttgaccaaacaaaaacccgtcgttgtgatttagcctcccttgctaccactcctcctcctggtttatagaactagtcacaggccttggtcagtgaattctgaaacaaggatttttcctgcaggagtggcatctgtttccttggctggaaacacacttgtgttggcagctctggggcaggcagctttgtggttgatggtgagggtagggagagatgaagtgcttgagacacagagtttctgctgcaggaactgggttgttaggaaggcactggggctgcaggttacgtgtttggacctatcagtcatttgactgtgggagagtaacttgcttaagccccagaatcatcttctgtgaaatagggatattaacaatgcttaatgagtaggtttttgaacagagtggataagtcaacaaaaggttaacatcctacctggtgtgtgggaagcactccataaacagcagctgctgtgtttctatctctgttattacttcccacataaagcacaggtgatgaccaagagggtgtcaacctatgtcaactttgttatccttccgttggagtctgtaattgaggctgatgtatattaacatggaaataaggtctcaggaagcaagagggtgcagctgacaggcagcgctgcaggcagacagctcataattttctcctcctttctgggtgggtcacagttgggactagtctctggattaaaaacagtgctaatgccctcaatgtctgcatgaaaaaaaaagaaacattggccaggcatggtggctcacgcttgtaatcccagcactttgggaggctggggcaggcagatcacttcaggtcaggagtttgagaccagcctggccaatgtggtgaaaccccatctctcttaaaaatactaaaattagctgggtgtagtggcacactcctgtaatcccagctactcaggaggctgaggcaggagaattgcttggacctgggaggcgaagttgtagtgagccgagatcgtgccactgggtgacagagcgagactccatctccataaaaaagaaataacaacaaaaaaacccagtgttaaccctgatctttcatggttgactccctgagtcaaaggtcaggctttatatgtgaccagcacagaagggccaattggtggtattcttagaacaatgacccgggcccacagcagtcactggcaatagtaacagctgcatagggtctgcttaggtctggatgttggggatggatctggcatggctttttgtggaagacatgttggaactcaggtctgtgggagaggaaggtgtcccctcccctcggcaggtttgtctccttgccttggatatggggaaggccagaggcacaaggggaaacagggtgtcaggaggttgagaagaggcctgtgttgctagaactcagagagtgaggggagcagggccttgtaggtccctggaaaggtttgatctttatcctaagaaagatagaaaacctttgaagagtcctaaactgagggctggtggtatcagccctgcattttaaattgatcaccttccctatacgacggggagagaattcaggaaggcagaggccggtatggggtgaccatttggccgttatagcagtcatcttagcaagggatggaggctggctcttcaggtggagatgatgggaattaaaataagttcaaagggtatgggagataaagtggacaagaccaggagtccatggcttgcatttttcgacaaaactctattatcaggatatattcctcctgtagcctttcttcctttacttaattttcttatggcccgcacagtctatctcctcctgtttttccctcaaaatcattctatgggtaaaaataaataccttccgacttacagcagctcctcttccagatgatgtaaatgagtgagtgactgcagtgagcagtgacttgtcacgagaaaggaactgggcacctgtgattgacatgggcacagagtttcttcctggagagccatcaggtccatgttccatttaccaagtgctcagcagggcctgcatttcgtagtggcatgacccagtggaggatttcaatgtggtttagtttattttcagcctcaaggtttaaaaagtcccacttcccagcggcctccagactagtttttaatttttttaaatgttaaggttgggttccttacatggcattctcaggaagtactgttggagagtcttccaaaagtaaaccagttatgaccacatgtgcttcttagtccaaccctgcagttgtacaagagtgacagtaaatctaacttttatcccagagaaaggaagataatgcgtggtgtgttgtttaccacacactgtgtagaattaccatggaacaagggcagggctgacccctcttcccctccactgcagccctcccacctccccaggcccaccgtaatcagatgctgagattgtcacagcagcttccccgctgccctccctgctttcattctggtgatgcccctctcctgtgaggcttctctgtagccaggtgatcctttgaaaatagaagttggctcatgtcactgttgggccctctgagggaaccctttaaggcttcccttcctacctggaacacaatcatatcctgagcctggccctcatccccacaggatccagccctggcctcttcctcctccctcagacatgcccaatcgttgttcttcatcgtgttgcatcttgggtggtcccttgctcttgcttcccctgtttcctggagttcttcctctccatctttacatggctctcttcctctccccatccagatctctgcttttttttttttttctttttttgagacagtctcactctatcacccaggctggagtacagtggtgcaatctcagctcactgcaacgtctgcctcctgggttcaagtgattctcctgcctcagcctcctgagcgattacaggcgtgcaccaccatgcctggctagtttttgtatttttagtagagtagtagtttttgtatttttagtggcgagggggtctcgccagattggccaggctggtcttgaactcctgatctcaagtgatccgcctccctctgcccccaaagtgctgggattacaggcatgagccaccgcacccagccaggtttctgcttaaatgtcactttatcaggaggtcattttatctagaatggcacttctggcactgctttatttttctgtgcagcttttagcagcacatgatagaaaaatgcattcatcttttggtctgtctgactcccccagtagaatctaagctccttaagagtaaggactgttctattctctgccgagtcttagtgtccagaacagtgagtagtgtggagcatgctgtagtaatgtttgttgcttgcatgagtacctgggaagtgcggtgctgggtccacatgattctgtctctgatagtaaggagatgttttctttaaatacttttgcttaacaaaccattcccaaaatgagtggcttaaaacaactccgattttggttactaacaattgggtgagttaggggttcagtcagggtgtgatgattgaggcagctgtgatggggacagctcatctctgctccatgatgtctgaggcctcagctcatggcggaaatgattggaagggcctgggccaactcaatgaaggccaaggtgtctgggtccttggctctggctgctggccgagtcctgccattttccttcacattgcatccccacatggctggcttgggcttattcataccacagtggtctcagagttctaagagggaacatcctgaaagacaagcccacgtgcaaggctcatcaagcctctgctaggctcacatttgcgaatactccactgaccagagtaagtcacatggccaggcccagagtcagtccaggacgggactgcacaagcgtgtggatcccaggaggtggggttcattccaggccactggtctaaccactggcattaccataggtagatgaaaggacagattgtagaaccagcctgccgggtctgaatcttcatgtaaccactctctattgataggaccccagggaaattgctgagcttttctgtgtctctgtttttctcatgggcaaaatgaggtggagagtatttcacagggagatcattgagaattaggtgaataatacatgtaaaagttcttagactacttcttggtgcatagggaacactgtatacgctactgggtgaccaaaacccacctgtgtgctgagctgtcccggccccattaactcatgtattcctttacttactctttcacactgttcctgttcttatttaatgttaaacacctgcaggtcccagccctctgctaggttctgtgatacaggagaatcccttcctggagttggcaggtggggagggcagatcgacaggtcaaggagcaatctcaatgaagtgtgggctctcccgggttggggagctccagtgccaggggagcccagagcaggagcccatcaccaggactgtggtggggacaggcagggagagcttcctgcaggaaccaacataaaaccagccttgaagggttagacagacttaggtggccaaagggttccaggcaggtggaggagcatgtgcaaaggcccagagacaagagcgggcacgggagttgaaagccttgtgcatagaaacacacagaaggtagcagagcccctgcccagctctcatggggagccaaaatatatagtggtccttttgcaattttcagtctgtagaaatgagtgtcaggcaaagagatacaagtcagagccccaggagagaagccacaggtgggagccgggcagagggccattcggcctcatgttgcaatggcctgtcaggcagaagagggttttaaggtaggtgttagctgaccagaagcacagctatggatcaaggtgttgggagctttttctgcagggctcatgagcctcttacccacttacctctcacttgctccactgggtactggctcgaagcacaatgcagagcttgatgcagtcctcgggttgtgttttgggagaaggctattatttgtttccattctttaagcactcatttttgtgccagagatgaaaagcaggcagatctgtgcacaggtggttgaagcactgggttgtaactgccccatgtgtgaggtccagagagcagggctgtcctgggtggctcagggctggcttcctgaaggaggtagcatctgagctcagtgcagaaagacaaacgggttttctagaagagcgactgggctggtggcttcgtctcttcccagagagctccagtcgcctgaagtccccctgggctggtgcctggatccctgaccccggtactgcagttactcctgcaggccgcgaggtactgggaaggatggcgaaatagacagctgctggctgctcctcagagctccacgatggcccccttcttcaccttcagggccctgccctctgggctgcgggccatgtggccaggctgcgcaggacatcaccaagatcctgctttgttgggagcataggcgcaaggcaaacttcctgggttggggtcttgactgtgccatttgctggcttcctgtccttgagcaaagtgcttgtaaagtctgtgcctcacttggttcatctgtaaagtggacgtgataatagctcctgcctcagaagagcttttctcagctttaaatgagctaatgtgtggcaaggacttagaacagcagaaaaaactgctgaagaaatgtcatcgccattatgttcattaatattattgaccctcagtggaccattattgaggatttttaatgaccttacctttatgatgcacaagccagcaatataagaattcataggctgggtacagtggctcatgcctgtaatcccaacactttggggggccaaggtgggtggatcacctgaggtcaggagttcgagacaatcctggccaacatggtaaaaccccgtctctactacaaatacaaaaattagccgggcatggtggcacgcgcctgtagtcccagctactcgggaggctgaggcaggagaattgcttgaacctgggaggcggaggttgcagtgagctgagatcgtgccattgcactccagcctgggcaacagagtaagactctgtctccaaaacaaaagcaaaaacaaaaaccaaacacaaattcataactaattttatttgttttaattttttttttctttagagacagtgtcttgctctgtcacccaggctggagtgtggtggcacgatcacggctcactgcagcctcgagcttctggactcaggcagtcctcttgactcagcctccccagtagctagaactataggtgtgtgccaccatgtcaagtaattttttaaaaactttgttagagatgaggtcctgctatgttgctcaggctggtgtcgaactcctggcctcaagcagtcctctcaccttggcctcctgaatagtgggattacggatatgagccaccacgcctgggtcccataactaatttccttgcaagaaaatcacagtattctcccaagcccagtttactcccagaaatcatctcttctgctcttaccagctttccccaaatccacaagggtttctgcatacagaattgagtgacaaaggaaacagtccacaagctacatccacaaacttcaaagtgacagatttaaatgaaactcttcctcttcctctatcctcctgtctaaaagcttttgaatcccctggctggaagctggaaagctggagttgccagagaagtctggtctggcctcccacctggcggctacctctcatctcctctgggtcctctgagcccctgccccacttctttagcaactggcttcttgacctttcaggaattcagttttcctgtctctaagatgggggaacacacatgcttccttggactgatggaactcagtaaggcagtgtgccattctaagttcgtaggaagtgcttgctgaaatcatcatcatcacccaataataatcacattatttaggctttgcctccctgaacgtgtgtgcatttcccggttccatcagtgccctttctcgctcctgtctgcaccaggtgacctcctgtcaccacagcattgcctccttctggtcctggcagccccgttgcggtgccgaggtgcctggtgcctgttccgcttccctggctcacacccctaagaggcagccgccattggaggggctctgggcacccagccatggggagcctttggtgggccgccagctgtgtctccaagcagcacggtgcccacagtgagggagcagctggctcttccagctgtctaattgctcatcagacccactttagcaccagcttaacaaattccactccttcatcgcaagccatctttttttgtgacctggactggcagctgggataggagtgggggagggttcttgcgttgggtttgagaaatttccagacccagatagagaagctattggtatttaggtctttgggtcatttttgtgggtctagcggttctagaggcatgttcaagggttcattcacgagctgttccctaaccctcctgcccctcagcagcatgtgccaggcaagtgcttgagatgagaacagcagaggtggcgagacagtcattcgggccattacctgttggtgaccatgcattcgccttgatgtagatctttcattcattcatagcacctttcaatactgtgtttattgagtgcctgtcatgggccaggtcctgtactaggcccttgggctgaaagtgaataaaacagataaaaattcctgctatgtggagttgcattctagttagggggagacagaagataatcaacaaataggataaactaaggatgtatagcgtgtcagaagctgataattgatatggaacaaaagtcaaaatagagaaggttaagggggctcaggagtgtggggagatcatgactttaagtgagtcgggatgaactttgttgagaaggcgttgcctgagcacagagttgccaagggggcactggccatgtgaacacaggcagggggatggtggcggtgtgcctgttgcgtccaaggaacaccaaggaggcagcaaggcagagaggaggcggagaagccacagaggcttcagacagtcacatcccctggggcctggtgaggttggtaggcagggaggctggccgcaggtgggaatgagaagggggccactggaggactgtgagcaaaggaggggtggcctctgagttagggttttggaagtttgctgtgtggagactggagtgtgggagcaggggtggaggcagagaagagctggcaggtggttataggagctcaggcacaaggcggtggtggctgggaccagttggggaagtgagaatggtaagaagtggcctgcccctggccttatgtggatgctggagctggaaggatttccaggaacacgggctgtgaggtgtgagtgagagcagtaccagatgcctccagggcattgtcctgagcagccagaaggatgtggagggaggctgctaaccaggatggggatggctttgtgggggccgagcaggagcttgggtacaggcatgttgagtgtgagctatctgaacatctacggagagacagaaggaacgtgggtatcaagagttcagttagtatgccggggcccacaataccgaatggaacacattgagggtattgaaagccccaaaactggataacgtttctgagagagtgagtgtaggtgggccaggactgagctctgtggccctcccacattaagatgtggaaaaaaggagataccagcaaaagagatggagaaggaggccaggcgcagtggctcacgcctgtaatgcagcactttgggaggccaaggcgggcagatcacttggggtcaggagtttgagaccagcctggccatccccgtctctactgaaaatacgaaaaatgagtcaggcgtggtggtgcgcacctgtaatcccagctactcgggaggctaaggcaggagaatcgcttgaacccgggaggcagaggttgcagtgagctgagattgcgccactgtattccagcctgggtgacagagcaccagagactccatctccaaaaaaaaaaaaggtgaaggactgaccagggaggagacaagactctcctagagtcctagaagccacgtgagagtgtgcttgcaggaggggagagcccagctgtgttgtggctgccgatggggcaaatgaggcaagcgcagttggtcccctgagtcatctggtggcagccattggtggcattgtcaagacctagccagtggactgcaggggtgagagcctgagttgcagagcattgatgagagagtaggagaggggctggagagggcgagtggagacagctctttccaggaggttggctgcagacaggagtaaggaaatgcagcagtaatggcagggacgtgcagcaggaattgtttcttcccatcagctgtattgaagtatcattgacaacaactgtgtatctttatggtgtacaatgtgctgttttgatctgtacgttgtgaaatgattaaatcaagttaataaacatattcatcacttcacatacttttttttggtgttgagaccatttaggatataatctcttcacaattttcaaggaaacaatcctgtatttttttatttttttgagactgagtcttggtgcgacgcccaggctggagcgcaatggcgtgatctcggctcactgccacctctgcttcccgggttcaagtgattctcctgcctcagcctcccgagtagctgggattacaggcacccaccaccatgcctggctaatttttttttagtagagacagggtttcgccatattaaccaggctagtgtgagccactttgttctgctaacagtccagtattcttaactacagccaccatgctgtcccctaacccgccagaactcattcatcctgtccaactgaagctttgtactttttgaccagcatccccccatctctcccctgccccgaccccaacctctggtaatcaccattctgctctctgcttctatgctcataagattccatatgagtgagatcatgtggtattttgtctttgtgtgcctggttgagttcacttagcataatatcctccacgtttatccgtgtcatcacaaatgacaggattttcttcttttttaaggctgagtagctttccattgtgtatatacgtcacgttttgtttattcatctgttgatggacacaggttgattctgtatcttggctattgtgaatagtgctgcaataaacatgagagtgcagataaataactcttcgacatactggtttcatttcctttggataaatatgcagtagtgggattgctggatcatatggcagctctatttttagttttttgaggaccctccatgctgttttccataacggctgtactaatttacgttcctacccacagtgtacaagggttcccttttcccagtcctcaccaacatttatctttcttctattttataacagccatcttaacaggtgtgaggtgctatctcattgtggttttgatttgcatttctccgatgattggtaatgttgagcagctggtcatacacctgttggccgtttggatgtcttccttgagaaatgtctatttgcatcctgtgtccattttttaatcaggttatattttcctgctattgagttgtttgagttccttgtatattttggatattaaccccttatcagacctattttgcaaacagtttcttccatttggtaagttgtctcttcactctgttgatggtttcctgagaatttttgttttttggaggtggagtctcattctgtcatgcagatcttggctcactgcaacctctgcctccctggttcaggcgattctcctgcctcagcttcctgaatagctggaattacaggcgtgtaccatcatgcccggctagtttttgtatttgtagcagagacgaggtttcaccatgtaggccaggctggtcttgaactcctgacctcaagtgatccgcctgcttcggcccccaaagtgttgggattacaggtgtgagccactgcgcccggcctcctgagaattttttttgaagagagacaatcagcattcagcagttgtttatgaagtgcctgctatgtgccaggtaccaggctactatctgacttaaaatggggaacaagacagagttcctgggtacgtgggatttccattttactgggaatcacggtgaaagaggcaggaatggccactgatggctctgcttagttccacatgctcacaaccattggtctactggcctcctccacttggacttatgatagctaaagcagaacatctgcttttcccaccaaaacttcaatttctccaccgtcttccccactgtattagttttcttttggtgtggcaacaaatggctgataacaaattatcttacagatttggaggtcagaagccgtggatttcaatgggctgaatgaggtggtggcagggttgtatttgtttccatagactctaggggagaattcctttccttgctcattccgttgttgacagaatccagttccgagtagctgaatgactaaggttcccgcttctggttggctctcagctgggggctgccctgagctctggaggcccccagaacccagaacaagcaatggcatgttgagtccttttcattcttggaatccgacttcctgttctcctgcttctcctctgtggttgtcttctgccatccctctcttctgctttcgactggagggcattctctgcttttaagggctcacgtcattagattgggctcacacaggtaatccagtatactctcctatctcaaggtctgtaactctaattatatctgcaaagtctcttgctatgtgcagcaacatattcacagcatctttggggcatgggcatctttgggggccattctgcctaccactagcatctctctctctctctctctttaagagagacagggtcttgctctgccatccagcctggagtgcaatggcacatctatagctcactgaagcctttaactcttgggatcaagcgatcctcctgcctcagcctcctgagtagttgggaagttggaactacaggcacgcaccaccatgcccggcttatttaaaattttttttttttttttttgtagcatcagggtttctctgcattgcctaggctggtctcgaactcctgatctcaagtagtcctcccacctcagcctcccaaagtgctaggattacagatgtgagccaccgcacccagcacccactcataaatgccacctcttggttgctcaaaccagaaatctgggagtcatcctgtgtttttccgcagactttgtctctgatttacaatctatagccagtcctgccagttccaaaatataccctggagatgaatggccatttgtgactgtcctcactgctatcgcctgggtcaggcccccagagtctctttgcctgggatgctattgtagctctgagctggtcacctgctttccatcctggctcctgtgcagtctgctcttcacacagcagccagagtggtttagcaatcagcaaacaggtcacagctcccagctcccctgatgaaaggcctccaacagctttgcctcatcctgagaataagatatgaagtttcccctgcagcctccagccccgtgtcatctgccgccacctgccgtcctgctctgacctgtcacctcgtctctgtgtgtaccttctttcagtcacagtggcctttctgttcccggaagaagtcccgcgttcccatgtcatcgcacttgccattccctttgccagaacattccccccgtgatagccccatgatggagcttcgagtcagtcagttctctgtgtggttgaggtctccccacagaggcccagcctccatgtctgcaggagctctcctgaggcaccctctccagtgtatgttttgcatagaaattgttactcccggaaattctccttacttatctgctcatttgctgcaagccagatgtaagtgctcagcagaactgtctctcatgttccactccccacaggtcccagggccctgacccatggcagtcgctcacaatgtatatactggggcagcaaatgcagtggtggcatcagaattccagagccttcttggagagtgaatggtacttcgctgcctttccatcttagtagctcagaggaaacgtggaacttgtaagggtttgtgaggtagttcctgaatcagacgtctcctctgttaaaggtgcccagtgtggagagcgttgttattttttatctaatatataatgagacaccaaggaggacttccagcctcccttgggaaatttccctgagtctctgtcggaggaggacttgtgtcttgtgtcattctctctcactatgatagcctggtacaaagagatcctccgtagacaagagttgttccatcagcagacagagagctggattcagccctctggcaggagtgccacgcctccctccccagattccccctcctctctctcctgccctctgcttccccagagcttccttgctttggcttcctagacataattaagattttccgggaagttgtctaggctgtacatcatctccgtgggcttttgaaatagcctctggtttgtcatttattatatcgttccgatttgtcaaggtctccttctcaacgtggggaaaaaaaatgcactccgcttccaggtgtacatgggaatcgtttaaaatacagcgtgattacagctgggccacctggctgctcgttctaccccgtctttgagaggaggcagcattggctgtgctggcttggtgtagccactggctaagaaggtgtcctcctcctctctgcccctgcctccagcctgagcaagccctagttctgctgggtgagggggatgctgggatgtttctctgcctcctccagcccgcagcccccacctggctccccgcagcttttatgagagctgtggcgcagaggactgaggagcggattgaagccagcccagggtcacgtgtggctttatggatgagagcccttgaatatgattgtcttcctattttctagtttttcttacctttgggacattttctcatcacctaatgctagtcttcaaactgtaaggtacatcaaaatcaccctggatagttattaaaatgcagattcctggccctcgtctccgatccacggaattcgtttctgggaaccgagacccacgaatctgcattgtaacaagtttccccttccctcccagccctccccatgtgactttgatgagcgtggttcagggtccccctttgagccctgctgatataatggacctctctgctcagatcaccgccacatccaaagtgccctgccaccccctaatcccccgctgcctctgcctctgccccatgaatgcagccgctcaggtctttgctcctgctgatgcgcggccacgttcctccagtcttctcttctgttcctgcaggagacagctgccacattgaggcttcacaggcacttctctgtgaccccttttttctctccattgtgacctgaccctatggcattcttcagaattcataagggaagtgagctttcaacgtgatttcttttttaaacctatcttttttatccccttgaaacatgagactttgccttgaccttgggtttcagggatgatgagtcctcttctgctggtgctacaggcgtccttgttccagccttgacattgttttccttgtaggttcctggagcagggatacattctggatttccaacatgaattgtgtgagatttttgttgttcttttaacctccctgttaccgtcttccttctcatccttcatctgttgtgcgcctggtgctccttgaggactttgtattcttggctttgggcttccttcccatgcggcttgaggcgctggcccatgttatctgttgttgtctagaagtctctccacaaagcccagccccttgcagatgatttgtctttgccttctgagcttctcttttctctcatgtggggtgggggcatccatgtcctcctggtctcttggagtgcgttccaccttctccgtctgcttgctctccagggctttcttagccaggtccccggctggagtggatgtttgctatgagcttgggtctgtgcacgcgtccccggctggagtgagtgagtgttgagctcaggtcagttcacacgcccccagctggagtgagtgttcgctgagctccagtctgtgcatgcgcccccggctggagggagtgtttgctgagctcagatctgtgtgcgtgtgcccggctggagtgaatgtttgctctgagcttgggtctgtgcatgcgtccccagctggagtgagtgtttgttgagctcaggtcagtgcacgcgcccccggctggagtgagtatttgctgagctcgggtctgtgtgcgcgcccccggctggagtgagtgtttgttgagctcgggtctgtgcacgtgtccccggctggagtgagtgtgtgctgagctggggtctgcgcatgagtccctggctggagtgagtgtttgctgaggtgggatctgtgcatgagtccccggctggagtgagtggttcctgagctccagtctgtgcacgtgtccccggctggagtgagtgtttgctgagctccggtctgtgcgtgcgtccctggctggagtgagtgtttgctgagctcgggtctgtgtgcgcacccccgggtgaagtgagtgtttgctgagctcgggtctgtgcgcgcgtccccggctggagtaagtgtttgctctgagctccggtctgtgcgtgcgtccctggctggagtgagtgtttgctgagctcgggtctgtgcacgtgtccccggctggagtaagtgtttgctctgagctccggtctgtgcacgtgtcccccgctggagtgagtgttggctgagctcgggtctgtgtgcgcgcccccggctggagtgagtgtttgctgagctcgggtctgtgcacgtgtccccggctggagtaagtgtttgctctgagcttcggtctgtgtgtgcatccctggctggagtgagtgtttgctgagctcgggtctgtgcatgcgtccccggctggagtgagtggttcctgagctcgggtctgcacgtgtccccggctggagtgagtgtttgctgagctcgggtctgtgcgtgcgtccccggctggagtgagtgtttgctgagctcgggtctgtgcgtgcgtccccggctggagtgagtgtttgctgagctcgggtctgtgcacgtgtccccggctggagtaagtgtttgctctgagctccggtctgtgcgtgcatccctggctggagtgagtgtttgctgagctcgggtctgtgcatgcgtccccggctggagtgagtggttcctgagcccaggtctgcacgtgtccccggctggagtgagtgtttgctgagctcgggtctgtgtgcacgtccccggctggagtgagtgtttgctgagctcgggtctgtgtgcacgtccccggctggagtgagtgtttgctgagctcgggtctgtgcgcgcgtccccggctgaagtaagtgtttgctctgagctctggtctgtgcgcgcgtccccagctgaagtgagtggttgttgagctcgggtctgtgcacgtgtcccagctctgctttgctgtttgtcgttcatcctctggatcttgtttaaaaagtgaatgttagaactgaaattgactcaaagtcttccccttggtttgataaatgaggagacccaggctctaggaagtgaggtgactgttcagggtcacagaacactccctgggaatttgtcagctatcaaaatttaaactgcatcccctttgactcagcagcttcatttctagacattcatcccaaagagatacttaagcacatgcacaaagagacaggcacgaggctgtagatggtggtgttatttgaattgggatcaataaaaggctggtggaatagatcgttggttcgatcctaaaatgcagcgatgacaaagaacggggctggtctgtgtacaccggcgggatgagagcgcaggcctgtcgcggagtaagaggtagcaacacggcaagctgtgccatttgtctgatagaaaacaaaaccagtaagagtacataaacctgtgacagtggtaaggagaccagggcagtgatgaagggtgacctgcactttctgtgctctggacttaggcatttgaattgttttaatgcagatggcattcacaaaccatgcagttcacgtgttctaagtgtataattcattggttttccgtgtattcacagagttgtgcaaccatcaccactgtccaactccagaacattttgatgagatcctgttcctatttgcagtcactcacctctccctgcagcccttggcaactatgaaactaccttttgtttctgtgtattatcttttgaatgcagtagactcagctccttcatgtgcagaatgggaagccagatgaactggatcagagcatgtaaagtgcttgccgtggtgctgggcacttagccagcctccagtgaaatattaactgacattgttattattgtcatgtcctctcttcttggactgttgtccacctttttttttttttttttgagacaggatctcactctgtcacccaagctggagtgcagtggcatgatctcggctcactgcaacctctgcctcctgggttcaagtgattcttctgcctcagcctcctgagtagctggtattatagccaccaacatagccagctaatttttatatttttagtagagacggggttctgccatgttggccaggctagtctcaaactcctgacctcaggtggcccgcccgccttggcctacaaaagtgctggaattacaggtgtgagccaccgtgcctggccccaacatcttgaatagttgtatggacccgatgagagagaatgagctctctagaaatctaacagattatcatacaacttgttggcctggttgggatttatactctatccctattccttgacatgcaggggtctggcatgtgtacaacagggccatacacatttaaaaatggacatatattttccctgcagtgaacatatgttacttatataatttgagaaaataaactttttaaagaaacaaagagaaaacattataaagccatgttaaatgtaccttgttagttggatggcatccctagtgagagtgacaaattttgtctttgttgactgatacatatatatatattttttgctaagtttttacagtcaggctcaagtgaggtattggtcagtaattcagtcaggaaggaatgagagtccaatttgtggatgtttcatgggttctgagaagctagatggagtctttgcccttttgaagcttctaatctaggtagacggtcaaggtcatgatctgatgttctattaatgacttcaatgacctccaccaccattgccatccatggagcatgctttccggaccaggcacccttctgattgattcagctcttccttgatgcctcctctgatgttaacctacgagaaaggtgtgattattctctttgttctgggcaggagactgtgtgccggccagctgagccccttgcagaaagtggctgagccatgatttgagcccaggtctgtctggccccagcccctgtgccttttgcagtgttgtgtcctcactctgttgacgtgcatcgttttttagctgccccatatctaactgcctgtggtatggcatagagtcctagcattgaggcagttctgtgaaatcctctgcatgggcttttgaaattccaaggttctcttcttaagggcaggctgcacagtaatttcccgaggaaggctttgttccataaacccaggccttacaaacaacagtttccgcctctgatatgtataactctgctgctttaagaatgaattgcagaagtcacatgtgcttattgcaccaaatagaaatgctccacagggccgggtgctgtggctcacgtttgtaatcccagcactttgggaggctaaagccagaggattgcctgcagtcaggagcttgagacgagcctggctaacaaggtgaaaccctgtctctactgaaaatacaaaaattagccggacgtgatagcaagtgcctgtagttccacctacttgggaggctgagggaggaggatctcttgaacccgggaggcataggttgcagtgagccgagatcatgccactgcactccaacgagactctgtttcaaaaaaaaaaaaaagcttcacaggtttaggatgaaaacacttattatctattgatctattgccctccatatcccagggcacaacagttaacagcctgagtgtgtcctttgtgctcagacctccgtgtacatacctggatgatacctttccactctcaccaaaatagaaccatactacatgcatttctgttactagtttaatttttgaacccagatacatctgctgtttggaatgagctgttttctgtttttgtttttgtttctgtttggaatgagctggtttaaaaacagcatttggggtgatccatgataccctgtccctttgctgacaagctgacacttccttttttgggtctgtagagtgcagttagggcccagagttctttcgagcaaatacttttgcaccacttgtttcagggcaggaaatcactctgtctggcacagctgtccgcatgttttattccagcaaagaagttttcactgtcaaactgcttttcacttgggggggagaaacatgagtctaaagtttccatcgaagcctctgctgggctccatcacatgagcaggtgggactgtggctggggaagggtgtgataacagctttgattttatgcaacagccattcccagctgtccccgtggatgcgttatatatttagctgatctcttggaagcgagacgcagcttcgaaacaggtgagcagatttcttaggaaagacacatgagacatgaaacttaatggacaggtgttctgattttaaaaagagggcaggctctcactcttgtatttggcttttaaaaaattctcacgtcggccaggcacagtggctcatgcctataatcctagcacactgggaggctgaggtgggtggatcaattgtgcctaggagtttgagaccagcctaggaaacatggcaaaacctcaactctaccaaaaaaaaaaaaaaaaaaaaaaaaaaaaagttgcaaaattaattatctgggtttgatggcacacgcctgtagtcccagctacttgggaggccgaggtggaggatcacctgagcctggggaggtcgagactgcagtaagccatgattgtatcattgcactccagtcagggtgacagtgagacaccctgtctcaaaaaaagaaaactctcatatctttgacacttggcatgagaatagaaagtaatttctatttttctcatgtttaattctcacaagagttaccattatccccattttacaaatgaggaaactgaggttcagagaaaggaagtaatgagtccaagagctgctagttagtgacacctatagggaaaaacaaattgtgtttttcttttttctttttttaagatagagacagggtctcaccatgttgcccaggttggtcttgaactactgggctcaagcgatcctcccgcctcagcctcccaaagtgctggggttgcaggtgtgagctgccgtgtccagcttcaggttgtttttccgtttatactcacaccgctctcaacacaccatttttgccgccacacgtatgggggtttcttccacactaggcaattctccaacaccagccgggctccctacagttgaattctgacaggacgtcatagggtaagggcttagtgccccaggactgcccctattgcggatttcagttgcaagtccatgttgtcacctgtgcttccaaccaaccagcccctctggagaccgtggtctaccagtcatctcagtagcttacagaacaacacctgtcacttaggagattccaagggacttcagagctgtatgccaggaaatgttgcaaaatgaaataatatatatttgctattatgaattatagtgtcactgtgatagagccaaaatttgaacccagagatggcgtgtgtctctgcccacactactgatcatctgcaattccccatctattattgaaaaaaaaaaaaaaaagaatatcccactcagacaacgtggttcttggtcttgttcttgagggatgcagtcaagtatgtaaattttttttttctttgagatggagtcttgctctgccacccaggctgaagtgcagtggcacaatctcagctcactccaacctctgccccctgggttcaagtgattctcctgcctcagcctcctgagtagctgggattacagacacccgccaccacgcctggctaattttgtatttttagtggagatggggttttaccgtgttggccaggctggtctcgaactcttgatctcaagtgatccgcctgcctcagcctcccaaagtgctgggatcacagtgagccactctgcgcagcccagtctgtactttttgggtagtgtttccttggcttgggtatcactggaaccccttgctttttagtggagaatccattacctgggaagtaggttcgtataatgtgtttttaaagcatttggaaaggttaaaatttatagttttcttaaattatgagtagacaaccaaaaatgttagcatgggtgcgagtgtgtgtgtgtgtgtatgtgtggcatgcaggggagtaggctccctttggtgtttaacacacggccttggatgttcccaagcgggggattttgaaattaagcaggctggggttttcatcactgggttcatcattgacagcattttctaaaatccagccctccgttttctcagctctgaaatagagatttcatgccgtggtgtttgaattctcaagtgggatggttaaattgtccaggctgtgatgtgctcctggggtcctttaggcagtagccccttagcacctttattgctgcctgtggatttgtgtttgtgctggagcccaagaccatggcagggcactggaacctccctcatcctgcaggagcagccatgtgtgctcagctgttgaccagggctgtccggaaagagcagcgcctctggaaggtgctgtagctggaggctgttgggtaaccgcattcctcgcaatggaacggcaagttatcttttggagggagatctgagctgtttactccctggcttctacctcccagcctctgcactgcatataccctgtggagtgatccctaaaaacgtccaatcatcgcacttcttctgaatcctccaggggctgcttgttttgctcagaataaaataccatagcctgcaaacccttactgtcccctctctggtctcatttcctaccaatgtctccctcctccattatcctttagccacatggggcctcctcactgttggtagaacatgtgggtgcccgccccaggccctttgcatttgcggttcccgggaacgttctctgcagggctgtgcggagctcactcccctgccttatcccagtctctgctcagacagctcctcactagcgagggctttcttcgaaccttatttaactagcacttgcaaccatcattttctcacactttaacttcctctagcccttcctctggcctggcatattaaatagtcacttcttgggtctctgagtctcctcactggaacagaagcttcatattggcactcacttttaccccccttgatacatccctgtatctctagtgcctggtacctggcaggtaatgaaccttcagtagctagttgtgtaggaactaaatgaaatacttgcccagagtcacccctgctaagcggtagagccagactttgactcccagggtctgtttcatcgcagagctccggggtcttgttgcccgtgtttctccctttgctacagtgagcacttgaagatggtggatgttactgttaggaagaccatttcctttgttggaacactgtgggtaaccggtgtcttgtagacatcattggcatctcacctggaagggtcctttctccttcggaactgtaaagtgtcccaaatttcctaagacacagaaccttgcccgttgttatgggacctgggcatacctcattttatgcatttgaatgtcctggaaaaccatctctgaatttaaaatgattctttattttcgtcatcagcatctcacactgtttgcatctgggtcatgctcagcttgttcacattgaaagcaaaacagtaacctcatcatactgtttgccatgccgctctccatggtatcagaagtttcacttaatttagacagaaaaccctatgtgttctctggtgcctgctagcaagctcagcacagtttctacctattttagacgacttaacacagatacccccaaacagatgtggccggctgcgatgagatgaaaagttatgaatgttctctaagtttagatgacctgctgatggtactgactaacccacagcttttctggaacatgaaaattagttcttgttgaacataaatgtctatatacttctaccaaacacagtctccctgtctatttgaatataaggagagaaggcttcttgtttttgccaaatcattattttcccatttggagtggaacttctataattatgccatcagggagacacaggagaaagttgctgactattcagagtataggcaggtaagtagactgcggatttttcccgtgaataaggtagatgttaactaggttgattggctcaatgggaaatcccagttaatagcatcaccatcttcacatttggcacgagattaaaatggccagactgaatcctgcttggaggctccagtgagattttgatgtgaaaatactgtgtaatctgcagtgctatgtaaattgaagcagtatcattattttgatttctgtgacaataagataggtcttactgacctatctttctacattgtgcttaaagcacaatgtaagtttctgattgaacatggaagtatccagccatgtagataaaagcttctgtcttcttggattccagcaggtgtacttttcatgcggtccttgaccagggcaaaatacaaatttctgaacactgtcaaggtaactcagaatatgggcagaaattgttaatgcatttcagattgcattgctaaccaatgtcttgaagccttctatttttgaagtcagtgtgagctatcatcgacatgaatagagaagtatgtttttctcttggggtattaaattgtcattctttccattttactttacatcatcatcatcatcatcaccatcatcatcatcatcatcatcattattattattattatttgagatggggtctcactctgttgcccaggctggagtgcagtggtgcgatcttgggtcgctgcagtttccatctcccaggttcaagcgattctcctgcctcagccttccgagtagctgggactgcaggcacgcaccaccacgcccagctaatttttgtattttaagtagagatggggtttcaccatgttggccaggctggtctcaaattcctgacctcaagtgatccacccaccttggcctcccaaagtcctagagattacagatgtgagccaccacgtccagccccgttctttcagttttaaaacccataaatcaccctcaggaaagatgcgacttagaaaagttgtagtttgatcagttgcaaatgtttgtatttattgtttaggtttgactttcagaattcagtcacaattgattctttacgaattgattggtttattggggggatgtgcaaagagtgtagaatggtgttgtcatctgttatttttgcctctcaaatgacttgacgttactcagactttaattgtgctgccttccttaatacccagatgttcttttactcccaaggcaaattgaaccttctcgacttgaaagtaaatccgatgttgtgcttgcatgaacttagcctcatgggatgaatggtctctcatgccttgaccccacatactcacctttggcagttgagagatgggagatgtctaacctgttcagtcgattccctcactttgtaaatattaatccttatgctgtggagcaacatggcacatttacctcttatttatatttatatttttatttttttgtgcatgtcatctacatgaaatgatatcaccatctccgtcacttcatggtctaactcagtctaatttaaagtggtctctcggctgggcacagtggctcatgtcagtaatcccagcactttgggagggcaaggcgggtagatcgcctgcggtcaggcattcgagacccacctggtcaatgtggtgaaatgccatctctactaaaaatacaaaaaattagctgggcgtggtggtgtgtgcctgtaatcccagctactcaagaggctgaggcaggagaatggcttgaactggggaggtggaggttgcagtgagtcaagatcgcgccactgcactccagcctgggtaacagaacgagactctcaaaaaaatcaatcaataaataaagtggtctctcaagaagtaactatggaatgattaaagactctacgttggttaactattgttgtgtaacaaattacctcacagttagatggcttaaaacaacaaacatttacaatctttgtgtgggatagacagcctgggtgtggcttagccacatgcctggctcagggtctcccctaaggctctgtcatggtgtcagttggaggctgcggttgtcccaaggctccactggaggagtgtgcactgccctcatgtggctcatgggggctgttggctgcgtgcatcagttccttgccatgaggttctctccgtaggaagctcgtaagaataaatgaacaagaaaggcaacctcacacagaagctgcagtctttataacttaatctcagtggtgaaaccccatcacttctgccatagtctgtttattggaggtgagtcaataaacatagtctgtttattggaggtaagtccagcctatgctcaaggggtagggattatataagaatgtgaataccaaggggcagggggaattggaaccatctttgttgaatgtaatatattggaaccatcttttttttttttttgagacagagtcccactctgttgctcaggctggagtgcagtggcgtgatctcagctcactgcaacctccgcctcctgggttcaagtgattctcctgcctaagcctcctgagtagctgggattacaggcatgtgccaccatgcccgactaatttttgtatttttagtggagaccagggtttcacctgttgggcaggctggtgttgaactcctaacctcaagtgatccgcctgccttagcctcccgaagtgctgggatttcaggtgtgaaccactgtgccctgcctggggtccatcttcgaagctgcttactgatgggaaaagtatgatatagttaggcttaattttgtattatttcatacatggaattgaaatttttggcatgcttgctaaaactgaaccagggcagcaaggaagtcaggtagttgcaggggaaggttgactggctagttgctgagagaacttatgtaaattcatgactgtccagggtctttccccaagcctttaaggtcaaaaagcttatttctgcacctctgcccccaccagtgttgaaggttgctgattcttcttaaatatagtcctagaggggctggtgccttggggacggggctagtgccttggggacaggaggccagtggcgtgattgctaatgagatgtgtggacttgaagcgggttgaatgaattgtgatgagcaggacctccttgcagagggcagcagcctgggcctgggcaagatgaagagatcatttggagtcacgggtagagcagggctgtgagttcgccattttgcgtatgtattagcaccaggctctgctgagcagctgcagccagcttcatgctgcggtgcctgccaaggtatctgtgtcctggttgccctgccgacgggctccactgctctcttacctgacttttctaagtcccatggctaagtgcaggctcccctcaaattctgattacatagtttacatatcactaacatataatcatagtttacacataattttgtttgtgtctttaaatcaaaactttgcaggtacatagataaagtcattggttctcttagctttattacaaaagacaggaggcctctggctgtcactgtctcccacttgccacccttcagaagcccctcttggaagcttttccactcatgctttgggttgttgcctccatatctctgatcaacacgcctgttgccgcttttttatttttcagtttttggaattacttatttctcatcgtggaagaggaagggtaactgtctttgactgctccacctccagaaaacacacgcaacacgcagctccccatcctctggcacagtcatatcatcattttggttagatcagtattcagtgattacattattataactggaaatgctatctacagctgtgaagtgcatgatcgtttttcctgcacgatctcttgatttctctggtgttaatacttaattcaactccaagttcatcctcagtgtgttaatccccctggtgccttcaggcactgtaggccgcctcccgcttgcacccaaggcagtctctcctggtgccttctggcctactctagccagaagcctgctgctggtgggcccacactctccaactcactttttttcttaacagctttcttgagatataatgcacataacatactgttcagcctttgagagtgcataattttagtggtggttttttgttttttgtttttttttttttgttgttgtttgtttgtttttgagatggagttttcctcttgttgctcaggctgtagtgcaatggtgggatctcggctcactgcaacctctgcctcccggattcaagtgattgtcatgcctcagcctcccgagtagttggggttacaggcgcacaccaccatgcccggctaatttttgtatttttagtagagacagggtttcaccatgttggccagctggtctcgaacacttgacctcaggtgatctgcccacctcaacctcccaatgtgctgggattacaggcgtgagccaccaagcccgaccctcagtggtttttatattcacaaattgtgcaaccatcgccactctctaattccagaacatttttgtcatgccccaaagaagcctgataccctttagcagtagggtcttcatccctccttcccccagaccctggcaactaagaccttctctggacatttcgtgtacgtgggctcaggtaatctgcagcctttcggatctggcttctttcccctggctgaatgctctcacggtctatctgtgttgcagcgtgagtctgctcttcattcctctcatggctgaatagtacaaccctgcatggctagaccgcatcttgttcacttaccaggtgatggccatttgggttgtttatgcttttttgttactatgaagtattctctggctcccttttgtgttgcatcccctatatcttgggatctatgtattacgattgctagaattcttcccttctttatgtgcggggtaaagtttctgcacggtcacatgtctgaaaatgcctttatcctgcctctcacgtggcttgcctgggtgtataaggctcaaaataatttttcttcagaatgttgaagaggtttcttcattgttttctagctttccatgttgctgtttagaaaccctatgccatttctagtttttatcctttgtaaaaattcttcttccacttcagaagttggtagcctgtcttctctgtcccctgtgttctcaagtctgtgagtgaggcttgcttttgtccattttgctggacattcattgaactcttccatcctgcccctcgtgtctgttggctctgaattatatctttgatttcctcttctgtgtgttatctttttctcctttcttgatctcttctccatttggacttgtagttctctattctccccacctcttttttttttttttgagacagagtcttgctctgtggcccaggacggagtgcagctatgccatctcagttcactgcaacctctgcctccgaggctcaagcgatccttccacctcagcctcccgagtacctgggactacaggcatgtggcaccacaccatactaatttttgtggtttttgcagaggtggggcttcaccatgttgcccaggcttgtattctattttgttattcgttgcctctattttctggaaattttgctaccctttcctttacagtccctgttctatttctgctgttatagtttcactctgtaaaagggcttttgtgtgctttgtgtttttctttttctcctttttaaatatctccgtattcttatttcatgactacactgtctcctcctctctctctggaaatattacccacagtttgcttttgaagtgttttccctaaatagtctctctttcctgcaagttgcttttctctgtttattcctgtctcagtctttcatcttaggtgcttttctcaaatgggatgtgatttctagatgtctactcaggtgttggaatggggttagaaattgatccaaagctccgtgaactttgactttgggcctcttggggtgatctggctgtgccattccactggagaactacccctggtctccaaagtttttttagattcctgggagaatacctttccattccctggcttagaggcacatgctgtctgcctgctcttctgggaatgagtggggctggggagagggaagaagaatgggagaaactcagaagttcagtgtgtgttacttttatgtctccattaaaaaaatggaataccctaacctcaactcagtccagacctactgcgttttctccagagaataaacatgtatattttgctaatcgcttcttaaacagacttttaaaacctttcttttgctttctagtcctgtgttcaccgtcatttccagaggtgtcttgtgctaacagttcattagcgttttatgaatcattccattctcatcagatattattttggtggcatccatgtctgtttaggaatgaaattttctcaggtctgtcaagttatttatcagtcatctacctgattcttagcttctgtaattttgttttttttgtttcctctccaattctttttttttttttgtgagcgatgtctttataaaaacctttttttgcttttattgttatttttgacacataataaattgtgcatatgtatgaggtagtgtgtgatattatgatagatgtatacaaaatttaatgatcaaatctgggtacttaccatattcatcatcacctcataggaaacattttaattgtttttttttttttttttttttggggggcgtggtcagagtcttgctctgttgcccaggctggagtgcagtggcaccatctcggctcgctgcaatctccgtctccctggtttaagtgactcttctgcttcagccctccgagtagctgggattgcaggagcatgccaccatgtccagctgatttttgtatttttagtagagacagggtttctccatgttggccaggctggtttcggactcctgacctcaagtgatccacccgccttggcctcccaaaagtgctggcattacaggtgtgagccaccgcacctggccttaattgacattttaatgggattttgagaggatgtgagtgtaaattactgtgttcaggctctcatctttacagagttcttcacagtttttctttccataactgtttggggttatctgttgtgattgggtcactccctgcattcgtggcccaggactcagggcttctttctgcgtgtttcctgctgtcactcagggtcttgagccttcggcgggctctaacagtgtggtctgaggaggcttagccacctggcttagttgcatcagttttgactcctggttttgctcagccttcctgactttcaccttcttcctgaaggctacccgcatcactggggggctagtctcagatccttgtttagcctcactgcccctccatacagctgatagggcatccaagggatttcttgtcccagaacacacaggaaactgatcctgcatcattgatgcttgttttgaggcttgaggctaatccacattcttaaacatgctgtggatgtttttctttgcccttggtgtgggaggtcttccctgttcttgttttctgcttttcttggaactatctggttcattctcagcttttctttatttgtttttccctgcagagtgggcatatatgggcatatacataatcatggaaacactactcagagccgtttgtgtgcatgcttgctctgacctgggagccagtctctttaacatgtcttttgcattgacgttctgtgttggtttccgagtttttctaaaggttttcttgctgtcatcctaagtatggtttataaataccaatccttggttttacacatactctgacccccattagtgctccacagctggctgtcagcaggccctacctcactggatcacttttttgttgtagaaaaaggaacttggcaaatataaaagatgtaagtggactgaatgcagtggttcacacctgtagtctcagcactttgggaagctgaggagggaggatcacttgaggccaggagtttgagactagcctggtcaacatggtgagaccttgtctctacaaaaactaaaaaaacaaaaaaagaactagcctgctgcagcagggttatgcctacagtcccagtgactcaggaggctgaggcaggaggatcgtttgagcccaggagttcgaggctgtagtgagctaaatgattgattgtgccactatactccagcctgggtgacagaggagaccccatctcaaaaaaacaaacaaaacctccaccccccaaaacaaccagctcttatgtcttgccaaacctgccaaaacattgcctgttttctcctgaaatggaaagtagtgacaagattatttcttgactcctgtgcttctgtctcatgacagttcttgcattttaaaaatacagcttatcgctttttatttttttaagtgacaaagtctagttatgtcacctaggctggatgacagtggcacaatcatagctcatggcagcctcgacctcctgggctcaagcgatcctctcaactcagcctcctgagcagctgacactacaggcgcacaccaccattcctggccttgtcactcgttttattgtacttaggtgaaaatgtcccattgttgaagtagttagtaagtgtgtgtgtgtgtttttcttgagagctttttcagtctgaagtcatctgagaaagaagaattttttctttttttactgggagaataattttcgatactgttgaaatatttatgacatgtctctctttctctaaagtgccaaatctttggagtgttgatggagaagttacagtagctgaacagaagccgggagaaattgctgaagaactcgcaagctcctacgaaagaaagctcatcgaggtaaggccggtggagtctgtgtgtctttgtttctgatgttggctgcgttggagactttccagggtaggtccagcctattctaaagacacgtgagcaaaacgaccaagcaactcctcagccccacaaaacaaagcaagaccaaatcagtgtgctttataaaaagaagtatgagctgatcctttgaaaaatgtcacttaaatattggaactttttggcacttatgataaggacataagagaaaacatatatgtgtaacattaaaaataaaacaattgtaagatttggagatgaaaacagagaatatcacatgcacctttgtgctgttaaatgtgaaaatatggatgaggtgaactatttttcagaaaaacattcattatcagaattaattgaagatgaggcaaactggtcgaagggaccccctcaccctcaaaagaaaagaaaaaaaaaaccaaaacattttggaataaagttgtacaaattactgaagaactgcttccttagaagacagcaagcctagagggtttcatggtgatttctaggaaactcttcaaggtaatacacaaagagccctttgctatttatatttcctgagagggtttttatacgtctctatcttggttcaggtatgcattactgtgatataaaaaaatcctgacaaagatagcataaaaaagaaaactatcaaatagaatcatttgtgtataagatgtacaaaaattctagaaagtcattactcaaattcagtcgcatattaaaagaacagtgcacataaaacatagggtttatttaggattgcaaggatggctgcatgttgggaaattcatccatgtaagtcatctcattagtagcctcaaagaggacaaccagataattatcttggtaggaaatgaaaaatcattttataaccttattgatacctgattaaaaaaagggtaattcttggatatgataaagaggtttttcaaaaaccattgatttattaccatattcaatggtaaagttgagaagctatgtttttgatgaggtgtgtgtacatgttgtaatggtcccttggtggtagtattgtaagtcatgtctgtatgtacatacatacacatgctaagtatacaagcaaactttcggttctttctaaatcttctacagtgagttttattttgataatcaagaagacactcgctcattgctgtgtagacatacctgagcttgggtgggtttcagaggcccagggccttggagggtgttcccctaagttcattgctggtgcaggctgccattcttaccatctgttttgtctggtctctaaattgcctctaaagaaggaaggtggctttagaaacagcttgcattctaactcaggtgagctcaagggaaggcaagctgaggccttaacacacaggttggtggggatgagtcaaaagccaggctggggaggcctggggacagggcactcctgtgtgctctctgcccagtgctctgcccttccttgggagctccctcagtggggctgtgagactcagacttggctggtggcagtgccagggttctgggccatgagtctgtgcccggaagtcccaagtggagagggaagcagggccccaatctcaggattgggacgacttgtgtcaggattcgaacccctgaaaggtaggactgtgtctttgccacctctgtacgttccacagccacttattggcaaatggtaggtgctgcgtaacccttgaatttttaagttctcctgggatggggatgtctggatttactgaatgaatgaatgaaggcctgatgagctagagaaggtgaaagggttctcagaatgaaagtgcaggatgaaaggttctgttcctctgggggaacaagggtgctgtggtgaggactccatcagaccagtgcagctcagtgagggtgcctacttcgcagggtccacaaaggcattgagtgctgggtccaggcagcgctctccgtggagattctccacctgtggggctgctgggcagcgtgtaggggtggggtgggggtgtttgaccctctgattgattgggtgtttgaccctctgagccaagtgccactagttcattcgtgggccgggtggttggatgatttatttcagtgtttatgagatgcctgctttctgcatcagaaacagcaagaacagaggctgagtacaaggaaagcattggcaggaactgaaaggagactcacgggtcgggaacagagtagatgaggggagaaaggtgatgctgtggctgtgtcctggccgtgtcaccacccgctttgctttgaccatgtgaaaatctcatcccctgctgtgctgacctgagctgagatgtgtggagaggatcaggtcatgtggggagttactgcagggtccacctgcctggccgttctggccagctgtgagagggtgagtgtggaaccaccaaacgggagggctcaaggttgaggcatgaaggttcgtcttactggcctcaagcttcctttcttttccttcttgtttgttttttttatcccgggagcagtagagatgctggctgtggtcaacgagctgagagaagtgtgaggttgaagcagacatgtcctcaaacggcatttactgcaccggattgatttttccttcttttttggttgcaaagacaggttctgccggtgatctttcatctgtgaatagcattagcatttcactacaccaatacttttgctgttaatcgagaccctcagaacgttctttgtgatgcttctgtcattctgttaatgggttgatttttaccaaaatagttgtaaagacttgttagagtaatgaacgaatgtgaggggaaaagttgatatagtttctttccgtgtcagaagggcaaaggaagaagaagaaacattgtatttatttagttatttatggagacagggtctcagtctgtcgcctaggctggagtgcagtggtacagccttggctcactgcagcctcaacctccccggctcaacggatcttcctacctcagcctcccaagtagctgagactacaggcatgtgccactattcccagctaatttttttaaatttactttttctagagatgggatcttgctatgctgcccaagttggtctcaaacttgtgacctccaacaatactctcacctcggcctctcaaagtgctgggatcacaagtgtatgccattgtgcccagtccatctcattttagataataaggatatttggaacaccttaaacatggtgattcatcccagtgcgaagggagtttctgagaatttttttatctaggtgtctttgagagcatgaaagccaactcatctatctgcacatacacactacacatttgtgcttggtgacctggaatccagtgtcctggacagcacagaacctaaagtcggtgccataaagccctctttaaatggctggtgggcatcttgtgccaaggactggaggtataaaaattgttcctgacaccctgtggttgttaactcaggaaaacaaggaggacaggagaattctggcaggtatacattaatctggcaagggtaaaagcactagtagtatcacagcccctgtaatactagcagcagctgtcaggtgagtactgttagatccaggcactgtgctggggtttttacgtagatgaacatatgtgatcctgagaagagttctttgaggaggacactcttgctgcctccagttcacagacaaagctttgggaagtttagtaactttcccaagagtccttagctgctaagaagcagagctggggctgggcgtggtggctcaaacctgtaatcccagcactttgagagaacgaggcgggtggatcacttcagactaggagttcgagagtagcctggccaacacggggaaactatgtctgccagatagaatctgtttccattctcaaaaattagccggtcatggtggcatatgtctatagtccccagctacttgggaggctgaggcagagaatcacttgaacccgagaagaggaagttgcagtgagctgggatcatggctctgcactccaacctgggcgacagagtgagactccatctcaaaaaaaaaaaaaaaaaaaaaaaaatgcagagctggatttgaatcctcacagttgagcaccagagtgcaaacccacaactctctgccgtgctttggaaggctgagctcattgaagaagaaggttaacttgacggaagagacgatcactaccgatgttcaagagaatgaatggcaggacacaagggggaaaactagtagtagataacagcaactgcagcaatatcagccatttgagatggcgctggtggtggggacatcacaaaccctttgttactggagaagaaaggggaaaagcacatcttgtctgtgccaaggattacctgcttccaaagcaacttgtagcagaacagcagagtgagagttcctcgagggcagtgcggacattgtcttttaaattgtatcttcattgcccaacccatctccagcatatagtaggagaaacataacattgaatagaaggccagcctgttgagtggcttcagtcatcttgtgtaatgcgtaaagaatgataaatgtgagtcctagaacctcagattgggagtgaattgtctaaggcatcacaattaagtatttttttgttttgttttttgagatggagttttgctctttttgcccgggctggagtgcaattgcctgatctcagctcactgcaacctccccctcccaggttcaagcgattcttctgcctcagcctcctgagtagctggaattacaggtgcccaccacaatgcctggctaattttttgtatttttagtagagacagggtttcatcgtgttggccaggctggtctcgaacacctaaccttaggtgatccgcctgccttggcctctcaaagtgctgggattacaggcgtgagccactgcactcggcccacagttaagtcttaactagagctcagagcaacctggtagaaaggattagatagctaataagagcacatgggttctggagaggaggcacactttactctggcccttaatgttagcaggaggcatagcttggagagcctggggacaccattgagtaatagatggtgccaactcaatttgtgcacatccattgagcgccttctcagtgtccagcccttagcttcctttctcctccctttgtggcttttcttaccctgggagcagcagtgttgatggttgtaggagatgagccaaggaagttgtgaggttgaaacagagacatccctgaaatggcattgactaccctagatggagttgttttttttttttttctttttcttttttgagacagagcctcactctgtcaccaggctggagtgtagtggcgtgatcttggctcactgcaagctccacctcctgggttcaagcgcttcttctgtctcaggctcctgagtagctgggactacaggcacgcatcaccatgcccagctaatttttgtatttttagtagagatggggatttcaccatgttggtcaggatggtcttgatctcttgacttcgtgatccacccacctcagcctcccaaagtgctgggattacaggcatgagccacttgcagagcgacttctgttgcaaagtcattggtgtttcatctgtgagttgcattagctcttcctcatgccaagagtggtcctaagttacaaaaatgaatgggacgcagtgcctgtgtttagggagcttgcattcttgtgggtgaggcagacgtgcctgttctaattgtcaggacagataattgaagtgcagaggtagggttatacccacaggcctggagctgtgtctttgacggcagttctgcagaggttggcacctaaccacagcttctttagataattcctccccacttcttagggactgttagtggtgatgctcagaatttcttctgtaaacttccccatgcttcttgaaattctaagacaccagaacagaaacaaccaaggttttgaagataagatattggacacatccaagattgatctcttctgagactcttgcttctttacctcttttaagtacatttcctttggtttggactcatcttcagagatgttctattctttttcagcagttgtcttcacaacaatgtgaagtgttggcgacattcggactttgggcctgcatcactttgtcgctgccttctgcagcctggtgacttggaaagcacatgtatcgcgtgtcagactgagttcagatttgccacttactgccgtatgttcctgggcacgccccctaacctctctaagcctcaagttctctgttagtgaaatgcagccagtcatacctgtgagtgggtttgttttgggaatgacacataagaacccagctgagtgcctgcagtagacaggaggtgtctctgtgcttcctcttctcccctccatcctgactttctttggagggcttccctctccaccatagcgtgctgtctgggtgggacagtatgtccaaatgctttgccctggttttggttcagggctgggtacatgacctgagctaggcccatgggggctttaactctggagttgtataagaatgcagcaatgcttgggaggccgtttattcaatagcaattaacagtaagcatttattcaatagactaatagcaatgagtctgataagactctaattgttttctgtgttgaacttgccagaactgctttggtttcggttccttttttttttttcttttttttgagacagagtctcattctgtcacccaggctggagggcaatggcacaatctcagctcactgcaacctctgcctcccaggttcaagcaattctcctgcctcagcctcccgagtagctgagattacagatgcgtgccaccacacccagctaattttttatatttttaacagagatggggtttcgccgtgttggccaggctggtctcgaactcctgacctcaggtgatccacccaccttggcctcccaaagtgatgggacggattataggcatgagccactgtgcctggcctcagttacttttctgagcctgatttccccacttttctgcctgtttatagtgaattctattttagcttaggttagaatctgtttattttgcttaccagcggtgctctcacttaggtaaagctttgtatccgtatgtaatcagtagatgccgtttcccttcagttctccttccactcactgtttagcagggcttagctccctcatgttgtcttcgggctctcccagctcttgcttgccggcaccgttttctagctgtttgccccacttgtgtatcttctgcttcaatattgccagtccatcctctgcaaacagaactttactcccttccatatggcagggctcagctagctgatgattgatttttaaaattataagacacttatcgtttactgtctgagtgtggttagtccctgaatttttcttgtgggtaaaataaatggtgtattagcaacatttgttctcattataatggcagagtcgctattaatggaaaagtaagcttgaacatcaagctggtaaaaaatacactcataatcacacgctgtagataactgtgaatgtgatcatcattttaataaagtgtaaaaattccggaagcagccaggaccttgggagcagttacaccaccagtgcctgcctcataaattggcaccaatgggttccaacacttctcatgcgtgtccaggagtcatttttgtataagagcagcatgggcttttcaataaaatactggattttttataaggactcaggataaaaaactctgagctgagatctacattaaactgatactcaaaatgaaaggtatgatgttaggtttatttatttatttattttttatttttctgatggagtttcactctgttgcccaggctggagtgcagtggtacgatctcagctcactacaacctccgcctcctgggttcaagtgattctcctgcttccccctccacagtagcatacgctaccatgctcagctaatttttgtatttttagtagagacagggtttcaccgtattggccaggctagtctcaaactcctgacctcaagtgatcctcccacctcggcctcccaaagtgctgggattacaggtgtgagccactatgcctgtcctgtttgtttttttttttaatcacatgaagctgagtggattgagaccaggctcttacctcatatagtttgattaccaagcaaaatggagtgtttaagtgtctcctatatatcagtgaaaaagggtaagaagttatagtttctagcaggataggtgtaattcccactgaagtgtgaatgactaacagggctaaacctccaaggatttttttttttttttttttgagatggagctttgctgtattgcccaggctggagtgcagtggtgtgatctcggttcactgcaagctctgcctcccgggttcatgccattcttctgcctcagcctcccaagtagctgggactacaggccccaccaccatgtgaggttaatttttttgtatttttagtagagatggggtttcaccgtgtaagccaggatggtctcgatctcctcacctcatgatccacccgccttggcctcccaaagtgctgggattacaggtgtgagccactgtacccggccccaaggtgtccttaaaatttttttattatgtaaaagttgaaacatatacagaaataaaagtgtaatgagcctctatgtacccatcacctggctgtagctgttagtacctcttggccagtcttgcttcatctgtatcccgtcccacccatcaaacctcagcctctcatggtattttgaagaaaatcccaggttccatattattacattcctgagtatttcagaatctatctttaaaagataagaggtcttttaaaaaccccacattactgcaataccatagtcatactttaaaaagcctgttaaaagaggctcgtgctagtcccattgattcttgggttggagtatcagggagaggagcttctttaagaacgtcttttagggggcccctggctcactctttctccttcccagcttcccgaacaaggaactggagcatctcatttatgcaagatggctaagctcggagcttttctgtcttttggatgtgccctttgcttggctctctgccttgacttcagttaacaacacacatagtcatgtcagcagcacactacacaggccctgggaaagtgagggatttggagatgaggaggtgtgaccacagcctgcaggctccaccagcgtatgggtttccagcctccagcatggtctcctttacaaacagactccttccctaaggaaggtctctgaaggaagaggaggcaggctgtatctcacaggtgtctctctgttttttttaaattttttttttaactggtaaaaagtaggcaaaagagcataaagaacttccatatactcatcaccctacttcaatagttatcaactcttgtccagtcttgtttcatccacttaccctcctgtttccccagcatcaagtagtgtttggaaggaaatccaaagcacaacgttgatttcacccataagtagttaggaatatattggtagtaaactacaaggactgtctttttaaaacagaaaaaactctgtagtatcattatcacaccctaaagttagcagtaattccttagtattgtcaaatatctggtgagtgttcaaatttgtagtttaaacaggtgtttgaatcaggatcccagtaaggtccccacctcgtgattggtgatggatctcttcagtgtcttttaatccatatgttctgtcacctgtgtctccctgcctctccctttcttccttacgtgtcatttattagttgaagaacctgggttgttgatcctagagaatttctcctaccagtgttttttgagggtgtattacatgtgtggtacttggtgacctgttaggtttttcatggcattttatgaaaagcagctatagatattgatgtcacagcctgggcaatgtagtgagaccctgtaattacaaaaaaaaatttttttaactagctgggtacatcagcatgcctgtggtcccagccactcaggaagttgaggtgggaagattgcttgagtccagaaggtcaaggctgcagtgagctattgaagtaggaggtgggacttgactccagaggcgggactcagacactggaccaaactgactactagctaaaacaggactgggtggaagcagctttccatcagacatgcccgtgggtgccatgtcagtttaccattatcatggcaacatccaggagttacggcccctttccatggcaatgacccaatgactcaaaagttaatacttcctctctagaaatttctgcataaacgaccccttaatctacacataagtaaaagtacctacaaatgtgactgcaaaactgccctgagctgccaccctctgtttgcggggtcaccctgctctgcagcagcagtcccggagctgtaactccactggagctgtgacaccgccacttcaataaagctgttttcttctacctccagcttgcccttgaattctttcctggacaaagccaagaacccttgcaggctaagcccttctttgggggcttatctgtcctgcatcactatgatggcaccactgctttccagcctaggtgacagagcgagacatctggggaaaaaaaaaaaaaaaaaaaagataatgaaggtaatagcagttagtgcaaattgaggggctattctatttttaggcactgtgttaattgcattacatggactgtttgattcattgttctctgcatacctacagatgatgaagccgaggcttggaagggttaagtcacctgcccgaggtcatggggctagcataggtagaagcaagatttgaccccctgactgaccccagagttggtactcttcccatcgccctctgtggccttctctgtatctgactagaaacaggaatcaggcctgccttgcctactagctctaacttttagttctaagtggagccaggaaaatgaatgcagtgacaaacatgctggctattagcttgtcaagaactagaacgatggaagagataaggagggaggatggaaacagattctagctggcgacacggtttctgatgtgagcacttactgggtaaacagccgtgtgtgctgccttggatggcaggccccttctgatgcctcttgtgctcactggatgttcccatctgttcctgtgtgctggggttatccgcccatgcagcaggaggagaagggtccactactggcactgtcttcttctcaagggctcttccttcttccctcctctcccttggcctctcagttactgtttgcatttgcctggggcatgttcaggtgcaggtcacaattgtgcctctgtgcaggcatgcttgcgcccctagccttctagtgtttatccttgctgatcttttgatttctctcacagaaccttggatacctcgtttcccatttcctggtgaggtcaccaccctctccggtggtggcgctgggccctgatctttgctgtttctccaccccatgtgttctgtttcgcttccatttctgctgaagcctcatttccagttgtgcctctgatctggaagtctggagtacttgcgaacgaacagatgaacttccttagagaaacacttggaaaatgatccaatactcctttttgggcgatagataaaaatacttgtaattatagtggctggttttcagcttttcagacccacactattttgggcctgttttatatttgccttcctctttgaggcgggaagtggcttcaagaagccacttctgggtccccagaaggagtcgtgtggccttgatggacgcgagtgaaagagatgtagtcctgtcaaggttgggctcagagttcagtatacacccggcgaaggggcagggctgtcctgaatgctgcatgagctcagcctgcaggcaacataaagggctcgtcactggcagtgtggagctggagaaacgggatacagcgggagtggagaacgctgagacagggcggagggagggacttgttgcatttaatgcatgtagacgggcaatgacaaactactctgggcccagtctacttgggccatttctttttctgcttaaaacttaccagtggctcactttagcatttaggttcctgtaaaagtaacatgttcacatgttaaagtaagcctttttgctatactcttgccttcctcttcagtcatgcttcttaccttgctctgagcatgttttcctttctcaaatgcacgtgttctcactgcagaccttcacacaggcaggtgtaaggtcccacctggaaccctgttctttttttatgaaccctttcctgtccgttttcgctggctgacttctgatctttcagatctcatcctggaagccttctcaaatcaccccactgcactcttgaagactgattcagtttgccccaggtgtcctgcacgtcctttgtgtcacctctcctaatcctcctagtacggtgtcgtgaatgtgtcccatttacctgtgttcatccttcatgacctctggtacctggttgatgcttgtatgatttaataatttttttggttgcagaataaaaaaacttggctcaagctgtctgtgacaaagactgtgtgatttatcaaggtctgtctcatttttctttttgtagacacataggacagatgcatttcctagtctcctttatgggtagcttgggactgtgtgactagttttggccagtgggttgaaagtagaggtaatgagtgttatgctagactgaggcataggagagtggggatgagttttcttggttcttgctcccctgccatggtgattctggaagctttgtgttccatgatgcatagctagaaaatgatactgacctggatccctgagtcactgcttggaggagagtttctctgttgtgttgctggatccactatagactttttaagagcaagaattgaatggtatctattcagcttgttatttaccactgagtcgagcctgtcgtggtaatctcgaggaaggtaatcctttggcctcaggaaaagtctggctttagctgtggcaaatgcttgatacttgagctgtgttacgaggctcctgtttctctctctttagtgctttcctcttccctttctgggttgacatcatttttggtagctgttattagtccattgtcacggtgctgataaagacatgcccaagaccgggaagaaaaagaggcttaatggactcacagttccacatggctggggagacctcacaatcatggcagaaggcaaggaggagcaagtcatgtctaacatggatggtggcagcaaagagaaagagcttgtgcagccccttatacaactgtcagatctcgtgagacttgctcactgtcacgagaacagcacgggaaagacccgcccccatcattcagttacctcccactgggtctctcccacgacacgtgggaattgtgggagctacaattcaaggtgagatttgggtggggacaaaggcaaaccatatcagtaggttttcctcctcagggtcacagatggctgtgatcacccctgggcacatagtttttcttccaggttcacattcataggaaacagcaagagtctctccattcttgtcaaaaaccttatgtttactctgtagagttaacttaggttccattctctcttttcagctgatcacaggatctggcttgtgctaagacagggaagagctccattgagacatggagaagggagattggggagagggatggatccccagatgaaaactgggactgttgctaggggaagcggatgccatggtggcagaaaaccaaggttcacttcagtgctcagtgcatgaatgaatggatgagtgagtgaagagtgagtgagagccagatcagtggatatattgaagaatcagccctctcccttgccttcgggtgctcacagcctactagtagagttagcgtcataaaacagtaatttttagcagcaagcaatcagtgaatcaaaagaagagggaaattggcgctgtcagatctgctggtggaggggttgtggtttggggtgtattagacaagatagtgcagaaatgttcatttcgaagctgggctttgcaggtagaataggaccttgccagtgagacagggtggggaagggcagtccagatggcaggaacagcaggtgcgaaggtttggccacctgggcgtgtcaggtggcaactgactgatagaccgtagagtgagacagaggcaagacgcctccatagttccttttttagcactgtttgtcattcctactagagagagtcttttaggtttcagatgctacaattaatgtttctttttctgaaagtggtaggattggaaagttctcccttttcctcgttttttctgtgtcttgattctccctaacacaggtgcatgtggagagctgcaccttcctcccgtggccgctcttggcctttggataggaatttcctcttaagtccccagccagtcatttcagacccattgaggaagatagagttttgtcaggtcagtggtgctgagaggcttctgtttcttaaaggtgctcttctagttgattgtaaggggcactgccagaagactttcagcttgaatggcttgtagcagtttggcttggaagacatcttgtaaaaagcgttgactccaggtgccccgccattttagaaacatcccccgatatgtaatagtgagacttaggactttgcttctaatagtgtgatattcttgtttgtttaatttgaaggatctaaaaccttctgttgcctccctgttctcttcctctgtgaggctgatacaaggcacagtggctctagtgttagttaagcttgtaaggatcagagattttactaaccttgtttaagttcttacagaagaatttttgctaacgtccagctgaggaactttcttatgtagaataaatcaaaattttcaccagagtagttcactcttattaatgaatgaataatgaatagacaaattatttaaatctaaattaatataattgacaccatttaataagcatgtactatgtgtcaaacattgcaggggcatcatatacatctttttattactatacatatattttcaaagagatgcggtcttgctatgttggccaggccagtcttgaactcctggcctcaagtgatcctcccaccttggcctccgaaagtgctggggttataggtgtgagtcaccacgcctgaccccatcatatgcatcgtgtcatttaatcttcacgacaaccttgcaaggtaggcggtggtggatgctgaggctcagaaaggttgagtagaatatcccgagttgcatagtcagcaagtggcagagctgacgtctggacccagttctgataacagcagtgactgtgatcctgctttcctgctgttcagacagtgtgtttgtttccgaagattagccagcctgcggtagaggttaagctcatcgtttctgtttcctgacacattttatgactgtcttctggtggaagacgtttctaaagcctgaaagagacttgaaattggacttggaatgactttgaggttttgtagcttctcctgattgattacagtgcaaattaactaaatgaattatttagctcaactaatagcgtgctttcatccaatagcttggtagaaagaacatattgaacattttttacttaatccactttgggggaatatttgaacagattaaaaaaataaagtacaaaggatcttttttatcaattaattttgagccattctgttcttttggaaagctgcagatatctttctcaatgattgttaaaatccttatcaggctggcaagcttgcattcattcagtgcttatacggtgccaggcatattcctaagcactttatttatctcatgtgatccttatagctactctgtgtggcggtattactctcatcctcgctatacagaggaggaaactgaggtgtggtgtgcttactgatggtcagggtcatgtaggtgctcagattccagacctgaagctcacagccactctccggggaggagaactttgaatccaaacaccaggagatgacggtcagtccccactgctggtcagaatgtgagaatcgaaatcctagctctaggcgcatgcctgggccctgtcacctgacctctgtgagcctcagatgtctgcgtctatggcctgggaatcatcatttccaatgtgtagcatttatagatcaagtagggagttgtatgcatggctcctgtcacccgtcatctcttgggtgaggtgcctgctgtgatggggaaccctcttgtctcatttgcctgttttggggacagacagtgtcactctcagtggaacagccctcagccctgtcatgtacagggtcactggacatcttctctcgttcctccctccgatgggctgagaatggcccggcatgcttactcagggagaatgagtcttcttggtttctaaagactcaccctgtctactcccaggcctgggaagtccataggcacccgcctccctctgctgtctgtctgtagcattctggatggctgtgggctcatgctgccgccatcatggttccctgttagctggtcccgcctccctgccctttgcctatgctcagcggggagcacagttcctctctgggtaggttcaggtcctttcagtaacagctcagacctgcctatgtccccaggctggctccttgcctccctactggctgtctgtcacttggctgagaactagagctgccctggacctctctgggcctttgtgttcaggcctaacacagctggagctcccgggaagagatgactgtcccttcctgtattagcctgttttcacgctgctgataaagacatatctgagactgggtaatttatttaaaaaaaaaaggcttaatggagtcacagttttacatggctggggaggcctcacaatcatggcagaaggtgaaagacacgtcttacatggcgtcaggcaaagagagaatgagaaccaagtgaaagggatttctccctataaaaccaacacatctcgtgagacttattctctaccacaagaacagtatgggggaaactgccccagtgattcaattatccccccactggttcttcccacaacacatgggaattatgggagctacaagtcaagatgagatttgggccggggcacacctaaaccatatcccttcccatgtccttgcttctccacttctactcgtcccagggttgactttcctaggatgacaggcagcggggtcaccggttccctttaaggatacgcacaccccaccatggggcagtgaagccagcctcccaggagaagttgccagaattcctgaacattccttctcttcctaccaacccaaggactttttcttgccaagtcgcccaccactttcttagttttgtttttgagaaaacaactctcacaacttcctttgtggctaattttttcccatcagtatcctgctttttctgcagcttccgttgacgaaggtacattttacctctggaaccggtggagcagagagctgaatataccctgtttcctcgggcttccttggagtgactcacaggttccattttcagtaccaaaaactcagctttgccagggcaagctctcagcaactcttttacagtgacaagtactttagaaaagtttcaattcacttatttctctgggtcacacaggcaactctctgccctgctttgagcaaagactatttctttagcaaaggatattgaaattgggttctttttttttttcctcactcccttcaagtagattttttttttaatccatttttaaggtagagaagggagatgagtcttataaaaacttgaaaactgtcttttgacaaagaccaacttctgcgcccagcgctttcatctccaggtgcctgagattaacgtttccaaaaatgagtcttttaaacagttcttctcctcaaaatgaaatatgttctgtggtaacaacccagttcctactatgtaatatgtagaaatcattttccctttgtgaagaaaactagatttaaatgctaacatattatctttttgtcttcctgaaaaatttttcttccttcggtggtaaaaagcttttaaagttaatggaaaattctccccttcctgtgctctggctcgggaggagagggagataacagatctcagtttctctgtaaatatcataatgactgccttcctggtgttagaggtttgaactgctgtgatggcatgtattttaaagcaaagtggtggtcaattttgatgaaaagtgataaaatcgagtggataaaattggctttcagcaagtagaatgctctgcacctgtaagtttgtgcccatggcccttatatatggggagaagaaagaaatttcctacaatttttttgacacatcagaattataacaatttgtttttggtgtagcacttcacatgtcttgatcattactaggccagcagacttttttatataaagggatcaatagtaaaatctttcggtgttgtgggccatgtgatcccctgccattggagcactgaaacagcccaagacaatttgtaaacatggttgtgtgtcaataaaactttatttaccaaaacaggcagggggcctgcaggtcacattgtgccaatccctaatgcaggtacttctcctacttagtgatggtggtgatgctgacagggatggttataccattagtatcagctgctgttttgagtgccagtcatgggccaggcaatagatacatttactgctcataaacactttaatgaagggtaaacgtggttatcgccacttaacaaaggactaaagcgaggcccacctaggtcaggtgacttgctctatgccagggttctcaaccccaacactattgacattttggaccacataatcgtttgtcatgggggctttcctgtgtgtagtaggatgtttcacggcatgcctggctgctgcccgctagatgctggtggcacccccttccccacaactgtgataatcacaaatgtctccagacatggccacatgtctctgggatcaaaatccctgctggttgagaaccactcctctaggatataccacttttttccccccgctgcagaaagaagacagggttaggggtcggaggctggagacaagggcagaccacaccagcagctgcactggggcggaggccacggcacctgttggggtctgggtttccccaccacacacggggcagtgtgcggtgagctgaggccctggaggctctgggccttgaatctcacctgctgccatggccaaagcctgggagtgattttcaagtaatgccagtaggatgtaccacttcttaatgtcaaaatctgggctggaaagatggtctttatgattttgtttttttgtttattggtttgttttgtgttgttctacacagaaataatgactgcccccaagccaaagctcttttcctcggtgtgtgtattcacttctctcctcctccgcatccctggcttccttcccttctcctggcctctcctacttgaaatttgctaagagagatctgaggtgtcctcagcaccccctgttgtgttataaagatcacagagttaaaaaatgataaccgtgggtggtgatggatgtgttaatttaattgcattcgtcataacacagtgtacacatacttcagatcatttctctgtacatctccaatatattccatttttatttgtcatttgcacctcagtaaagctgggggaaatgtgagctgcggaatatcgttgattggcttccacgtctggctccacctgtctcactgaacaactgtcgaaaccttcccagctttgctgaacctcacttttcccctccaggaagtggaacaataatagcacttatgggccaggcgctgtggctcatacctgtaatcccagcactttaggaggcccaggtgggcagatcacttgaggccaagagttcaagaacagcctggccaacatggcaaaagcctgtctctactaaaaatacaaaaaatagcttggcatggtggtgtgcgtctgcgatcccagctacttgggaggctgaggcaggagaattgcttgaacccaggaattggaggttgcagtgagctgtgattgtgccactgcactccagcctgggcaacagagcgagactctgtttcagaaagaaaagaaataataatagcacttcagtcatggcataattgatgtggaatgatcaattcaatgctcagtgaataactgagcaatgcaattcataatgcaatgaataactggtatgatgatgatgacagtgacaaaaatgataacacagataatttccttagactcctcatcccctggatggttttctgcagggctgatgtttatcaccttcttcaaggtttcatactttgcagaatcttgaacaagcctgtgcagattatacctttctttgccatgaacaagtctatgatcatgagaaagttattaacctctctgagcctcagttttctcatctgtaaaatgggaatggtaatagttcctacctcctagtgttactgtgaagaataagttaacatgtgtctaacatttagaagaatgtctggcccttaaatatatatgcatgttgtgtgtttttagattttcctgccaatgagagacagaaaatactctcttactttcctctctagaataggccaggcatcctctgctgcctcccatggctgggaggacccttgctgtctctcaccggccaaggaaggttagatgtgggtgtccccaggggcccaggggtgacgatgtgggtatagtgacaacagttagagttgctttcacatgtggcgtgattcctatgtgcctgatggtattaccagttgttacctacattaaccttatcataatggaatgaggaagccagaggaaccaaggctttgattcttttatttatccattttcataataatgagttggttcctttccctcctccagagaggaccaatgagtctttaaaaaaaaaaaaaaaaaatagggctgggcacggtggctcatgcctgtaatcccagccctttgggaggtcaaggtaggtgaatcacttgaggtcaggagttcgagacccacctggccaacatggcgagaccctatctctactaaaaatacaaaaattagttgggtatggtggcacatgcttgtaatctcagctactgaggaggctgaggcaggagaatcgctggcacccaggagacggaggttgcagtgagctgagatcatgctactgtactccagcctgggtgacacagtgagactccgtctcaaaaaaaaaaaattacaaatttatgtatttaagcctatttgatgttttccagttcatcacagtaatttttctttgtgatattcaagttgtcctatcttcagcccatggacggtgtttagtttgattcctgagtcctcaagagtagtttttgccattacactggacatcaaagcaaggaagctgaggtgttctaggcccttcttgtacttcatgccccagacctggaaacacctgttcctccagggggccctggctctttgactgggaaaaggtatttatacagcataatctaggtagtggggagtgctcgttgctactgggttggctattgtttctaggccttttcagtgttcagagctagaaaatctttccctttcttcttccccacctgcctcttccctccctttcccccaccccatcccttcttttttagtagactatatattatgatccatagatacttctaattcaaatttcgaatttttttttttttttttttacttaactaccttgatttaatatttgtatcttttttcttacactagaaatctcttaatggcataaataaaatttctttttttctttctttgagatcgagtcttgctctgtcacgcaggctggagtgcagtcgcgcaatcttggctcactgcaacctccacctccctggttcaagcgattctcctgcctcagcctcctgagtagctgggaccacaggtgcctgccaccacgcctggctaattttttgtatttttagtagagacagggctgcgccatgttggccaggctcgtcttgaactcctgacttcaggtgatctgcctgcctcggcctcccaaagtgctgaggttacacgtgtgagcccctgcagctggccgggataaatacaatttcttatgaggttttgctaatctggtagccaagtaacgtaatctccatgtagttttaatttgcatttctctaatatgaatgaaaagaacccttttttgcctcctgtcttccaccactttctccaaccaaggcagagttgatcacattttccttcctgtccccataatgccttggagacagcgctctgatagcatcgatcatcagtgatcagcttggtggtttctccaagctgtatattttactctgtatattttactgtctttttatcttccattgtttggcattgtgttttgccttagtgtttatgaacgacttaatagttctgacagtttttacttagatctgttaacctcagtccctttttaattcctatgtaactgcttttccccagcagagcagctaaaaaaagaatgatgagagagaatagcaacacaagaaaaacaagctgttgagaaaaaccagatgcatacttgtaaccctgacttctctttgagttccaggcacacgttgctccagcggccgtcgtgacatctccgtggattgtctaaagtagggtttctcaaactcagccttgatgacattttggactgcgtagctgtttgctgtgggaggctgttccgcatgttgcagggtgtttagtgacattgccccactagccttacctactagatgctggtgacatctccctatcccagttgtgatcaccaaaaatgtctctcgacattccgtactctgcccttggaagcaaaaataccctcctttgaggaccactggtttaaaggcatctcacactgaataaggccagtgcagaactctgttcttcctcctgacttgtgcgtctgcggttttctccatcttcctaaatggcaccactttccattcagctagctaatcaagttaaacagcctgagtcatccttgatttctctctttccctcactgtctacatctagtcactcaatgagttacagtcccttctaaaatatctcataaagccaaccattgttttctatctgtgttgctaccacaaatctaacttgccattttctcttgccgggagtactaccagtagactccttcctgtactctgcaagctgattccaaatccgcccacgctctggcgtgtgcccacatctcctgccttacctgtcaccacactcctcgttctactctccagccccctcagcctgcccctaggaagggccagggttactccaccctccagggtcttgtgtttcctatactccctctcccccaaatctccacatggctggcttcgtgtcctcccagtctccattcagtgtcaccgcctcagtgaggccttccctggcagtccagtctgatccaatggtgccttctgtctgactaatccattgtattgcccagttttattttcctgattgaaatatcaggatccccagtcttctcgattacgtcgttgttggctctttatggtccatctcccctctagaatgtaacttccaggaaggcagggatcaagcttaccttgcttccctttgaatcctggctcggaggatggactctgcatgagataggcactaaaagactgtgacattaacattctggtgtttctctgagaggactctagtcgcggtttgccttgccctatggacagagaaagaaagattttaatccttctcagagtcgaagctcttttacaggcatcatcccgaatacacttgatagtcacactatcactttcctccttacctaacattgcggctgctggtcctcatcccttgtaccatgtttaaagaatattgatcctgaaggtaaatttcagttatatacaaaagaaagataattacttagaatctggttctgtctcaattcacaatgaaggaaatgaaccagtgcctacggtcctttctttatcagaatctagaatgtgtgtgtgacccagtgatctaagacagagatgggaaaacctcttttgtaaagggccagagggtggatgtgttggtgggatggacgtcgtaactattcacctccgtcaaagcggcatggaaacagatgaatataagcaaatggctgtggccacgttccgtcaaactttatgaaactgatttccaaaaagtaaaagtcagtttctacagttacagcaggcacacttctatgttttttgcactgacgctgtaattttctgtttatcattattgattgtgttatctactgtcttagtgtgttcaggctattttaacaaaataccataaactgagaaacttataaacaacaaaaatgtatttctcacagttctgaaggccaaggtcaaggcagatgtggggtctggtgagggcccactttgtggttcatagagggcatgttcttgccatgttctcacatcgtggaaggacagggggtctctggggccttttttataagggcataaatcccattcgtgagggctctgccctcatgacctaagcgcctcccaaaggccctgctcttctaatacattaccttgggggttagaatttcattgcgcttttgagggaacacaaacattcagaccatagtttctcctgttctttcactttggaaacttcctgctaggtaataccttttataaaacgccatggagtgacttggggccacactgttagggtgaatgcattttaaaagacatctcatcagtgcacattttctaaaagcacttctagtttaagaggatcaatcttggctcttgaggagcttctgggctcgtgttagtgaggataagcccaagcttgtcaccgttcaaaagttttaaagataattttcaagaaatgatgtttataaacacctgcccaaaggtcatgtgatctggctatgtgagacccttttgttcttgaagtaagctagataaaaggcagaaacaaatgcagcccaaaccattttactgctcagagaatcttcttttgcaatttaccgtgaagctgtctgtctgttgcaggctgtagactggcagtcgatagaggtatggagttggtccacatagttgcttttgttttttttaaaaaataattagtttgaccaatattaaaacatagatgaattttagccccaccctagtgaaacacttgcccacgaacaccaggagaaacacagccatgttcacagcatcgctcacgatggcaaaacattccacacaacttagatatccatcgataagagagtcgatttttaaaaagtgtgttacagcatagaaatcaacacagcaaggaaaatggatgaacctcagctgtgcacatcagtttggatggatctaatgaaaattgtgtggctcgaagaaagcgagttacagccaaacacattcgtaagaatatgagaaaagtgtagaatggaacaggaggtaggttaagaattcacacttgtgggaagctatacggaaaggcaagggcatggtaaccataaaaattagggttgtgatcatgggagagggccagcattggagagaggttctcaaaagttccagaggttctgtaccttaaggtggtacacaggtatatgtcttgttatggttcctcatttcctatatgtagatatgcattagttattctcttgcatgcttgaagtgttttgtaatttaaaaaattagatgttctggaagcattgggctgatgatttccacatagcagcggttcactgggcggagtcacagctgagtccttgagaatgacgtgcaccttctggtttatcacagtacttagctgtactctccctcctattcccccagctgagcctgtcttgcccattttcagtggcgtttgaggtttggatgtctggccctgggatgttaggggatacagcctgttgaaaatggtcatagtgttttctgttaacacattggtaaggcagttgttgcctatgcatatcgtgtgtaataagaatgatttctacctgagagaaatttttcccaggcctaagtagcaggaatgagtcccttgaccaagtggtcagatcttttggaggctgtgaatcctatcactgttttttgttttttttttttgccttgacttctaagaagcttgacagaaatgtgagctcatctttagcaaaagtggagaccttgtggcatgtggtttttggttcggaacttactgttggcttttttgttgttgttgcactcccaggctggagcgcaatggcgagatcttggctcactgcagcctctgcctcccaggttcaagcgattctcctgccttagcctcctgagtagttgggactacaggtgcacgccaccatgtctgctgttcagatttaaaacagacatttaattcattttgcagtttgttgaaatagaatctttggctggagaattagcatattacagaggctttgaaatctttgtccttttctggccagggctgagcatgtaaatgtctttgaatagagatggggtttcaccatgttggccaggctggtcttgaacgcctgacctcaagtgatccacctgccttggcctcccaaagtgttgggattacaggtgtgagccaccacacctggccagcttcacttattttcttgcttctcctcctattttatttcctcacttaagaatattactccataattcacttgtttatataagtggccatatttttttaaaaagagaggatatgaactataaactctcatttacctagcatgatggcagaatatgattttacgagaacattctggaaagctgagctttattcagaatgttttattcacaaagctgccttgatcatctatttcagctgtgcatgttactaattttccaagaatgagaatataattaaaatacacttaatgctaaaatgcaactgaacataatttgatcttcgataatttagaaggcagttaaagagcgtgctgtgcctcaaggctgtaattaggaacatcaattatcatagtgtgacactataaaaatctggttatttcggctttctaatgatttgaaatctgtgggaactagaatttcgagtctgtgcatgcagtctgtgtatatataggtcttttgagcccctcatatgagcagttcatacatgttttcatagctgatgagtgtgagaaaggagaggccacctgacaagtcttggcagaggtgtgacgaggttagactcaggtgttgcgaagatcccccccggccacggagtggtatcaggactggagcagggcaaggctaaggcagtaatccctgcccaaggtgacagggaccaaagggcacagcgccgagggcgtcaagccctaggcattttagctgccagtgactgtgacactggcaggtcccttcacttctctgggcacacttgaccatcttcagaaggagcaggagtgtggagccataggccagaggaaaaatcagtggtcctgagcctgtcctcatgcctgatttaaaattttgctattttgttctccatagatttatttttttggcattaattttgatatttcaaaacattgcatggaaatattatttatcatgattactgagctttttgccacctccttaaattttgcacctagatgcctgggtgttgtgtatccagactccgaaaacttctgaatggtgccattcctaattacaatttttaattataattctctgggctttgaatacagaaagactgtgtttccacttagaatttggtcaaagcccttgtccttttctgtacatcagggtggagtaccgacgagctgtaacctgttcggatttaaaaggctctgtaatatgccaattctccagccaaagattctatttcaacaaactgcaaaatgaattgaatgtctgtttaattcattttaaatagtcctcgttttatactggaggacacggttctctctgtggccttaacaacctgactcaccatctgtctcacaccctccctcagccaggcacctgcatgtaaaaccattcatcctcatgatcatatgaggggccctctcctctgaacctccatttccctcttcttaaacagtttgtgaacagactattttattttagcaatggatttcagaatagtgctctgtcaactggaatggctttgatatagaaagagttgcatcgaaattctgtgtactcttaaccactgtgggtctacattttctcctcactcacacggcatggtgatgccaactgcatatggtcatgaggatgaatggttttacatgcaggtgcctggccgagggagggtatgggatagacggtgagtcaggttgttaaggccacagagagaacaatgtcctccagtataaaacgaggtctgtttaaaatgaattaaacagacatttaattcattttgtagtttgttgaaatagaatctttggctggagaattagcgtattacagagcctttgaaatctttgtcctttcctggccagggctgagcgtgtaaatgcctttgaatacgtgtttcgctgtctttgtaactacattccctccagcggaaattgaaggcaactttcaagtttaatgatgattacactgagttaggcccctgctgatggcagcactcctgctgcagcggcatggtctttggggataatattcaatattgcttccccagcactttagaaattcttcagaaaagttactagggatccgatagcaaaggacaaccttgtcagccgagctgtcctgtgtaactccctggtggccagcccctagtttgggcagaagctttgtcttttggggaggtgggtagagtgactgttcttcaagggtttgccataagagagggcttcggtgatcgcaggaacacaagcttcagggctgcctgcacccccttgtgcagggaaagggtgtgagggaagtagagtcatcctttggagggacccggagtagatgcttagtatgggccttacaagggaggggagttccctgaattgggcccctctcctctgaacctctgtttccttcttcttaaacagtttgtgaacaggctattttattttagcaatggatttcagaatagtgctctgtcaactggaatggctttgatatagaaagagttgagttgaaattctgtgtactcttaaccactcttggtctacattttttcctcgctcacatggcatggtgatgccatctgcatatgatcacgaggatgaatggttttacatgcaggtgcctggccgagggaggttgtgggatagatggtgagtgcggttgttaaggccacagagagaactgtatcctccagtataaaatgagaaatgcaattcctgtcattaaatgaggtgatgtcactaacatcatgaggacagtgccaggcgtgtggaattctcacatttgtgaatgttgaatggggtatggatgctttcatgcagggctggtctgggtacaattttgtccccactttattctgtgtctggacagagttgggaagcttaataggtgtcaaacatttgcctgcttaatgcctaggccaagaagaggggagaagttgtcagcagtagaatgtagaggctacacagggtcatgaatggtcttggatttgccgaagcctggaatggcgtggagaatctgtcttgagggcctgcctgtctgcacagtggtcaaggcctagatgcctttgctaggctcggccttggctggtaggcaccaatgtagccatcaatggcaaaacacacctccatcggtcagcaaagtcctgctaccctgagatcctctcatggtgacgttcacttccccaatgaccctgaccttctgaactcctggcccaccaagagatgggagagaagaggtgggcttcctctgcaatcagggtctgtttgagttgtcttcaggacaaacaacgtttggtgtagacagagtgctgtgttagccactgaacccatccctcattctgccttcatggtgctcatatgggagagatgcacagacagggtctacctcagctctggcctcccagtgtaacagtagcctacagcctgcgagggctcactgctgaaggtgatgcatggtctctgctctgagggtttttccccaaccaacagcagagatggcacctcgctggtggtgctgacacccggcaggcaggcacatttatgcctactgctcatctgtccccaccaggtggcattccacagaatcacctgctcatggtggcttctgggtcccacagcctctactgtgtatcattctgattgtccagtaatgtgaacgtttccctcatggggtgtggggtatttacggatttcatccaggctttgggtggcatgttatcccttctgcagggatcaacctcttagtagcggccacatcctggattgttgctgtagcctggcacttctggggccctctgcagatactgtcattaatcctcaggtcactcatgccaggtgggtgccatcgtcatccctccttcatgtttgtcaacttgttgtgcactcctccggagtgccttccgtgtgctagtcacggcttcgagtgccagggataaacaggaaacaagacagaaaaaatcctcgacttctaaggtataaggcagactcttgcaatgcctgtgtaatattttctactgctatttacacataaatggtatttctagatgggtacaaattaaacacgagtccatcagtttctcagctggagagtcttgacaacatgtaaggatttatttatctaatgagcaaaagaaacaagaacgcctgcctgcaagtcccggtggctgcaagtgtgattatgtaagctgtccgttatatcgaaaagtgctagaagactcttaagcctgttgcatgtaggaaggagagaatgagtcggggaaatgcaggtcacaaccagctggggctaatgggacaaacataaatggttatggcagagactgttacaaaggaaacctcactttgagagaggcaatggaaaggttgtctctctttgggccattagcattgacagaacctgctctcagattacccaccaagtgtgtttcggagttatttgggggttctgcaaccctgctgtgatttctatatacagcaagagatgggagagaagaggtgggcttcctctgcaatcagggtctgtttgagttgggttcaggacaaacagcctttggtgtggacagaacgctgtgttagcccatccctcattttgcctttttggtgctcaagttggggagatgcacagataggggctacctatctagcctcccaatgcaacagtagcctaaaacctgcgagggctcactgctgaaggcagtgcatggtctctgctcagttatttatccctctggaagcccttcttccctgatccccccacaagtaacctgtcccctcccatctgttgctctcttggcccctctgtctcatttttcttggtagcacccagcagagacatttatttgtgtcctgtctggcttctccattagcttgtccactctttgacggcagagactgacttgttcaccatggtgtcccagagcccaatgtggcacctgtcgtcacatagtaggtcttttctgagcatgtggtgaaggaatgggtgcccacagtgattctcagagggaggtgggttctcactcgttacttgaagtgaatgtgttcaacactcttaaatcgctcccgccagttagtatctggctgcaggtattgagtggtttggaggaattggaagggtttcctttagaaagggcagtggagttgaaggcacctgcgtaggtgtcatgcagtgcctttgaccatcccctacccttggtctgaagtctgtgtgtatcccctcaactctgcagctgaagttccagcttggtgcgagtttgtattttgtcttgatacttcttgagctaaatatgcagcagagttcaatcagaagcaggatcaccaagataaacacagacgtgtgcacgcacgcttgcacacatggatgtgtgcacacatatgtacacacacgcatgcacgcacatacatacacatgtgcacacatgcacacacatgcacacatacacgtgcacgcacacatgcatgcacatacacactgcatagttgacatatggtgtttaccgctgcaccagctaaagttctctcatgtcagagatcatacatgcattgcattaggagagactcaccgaaatgctacttgaccctgaaaaaaggatgtaacaatgagataatactccagcttcaaaggcaaggttctcattcccctcctaggtttttatcctagagaaaaggaaatacacgttcacacaaggacttgtgcacaaatgttcagagcaactttgtgttagccaactagaaaaggccaaatggccattggcagtgaaaagatacacaagttgtgtcaaggaggaatgaaccattggcacgcgtaacagcatggatgaatctcaaaataactgtgtgccaagtgaaaaaaaaaaaagaccataaggagcatatgctgtatgattccatttatagaaaactctggaaaatgcaaactaatctatagggacagaaagcagatcactggcgtctggcgacgggatgggagggtggcattaccaggagtctgaaggaacctttgggggtggtggacatgttctgtgtcttgtgatgggggtttcacaaacgtaaacatatgtcaaaacttgtcagaaggtattctttaaatatgtgcactctgctgtctgctggttaaacctcagtgaagcttaaaaaaaaaataaaggcaaggtgggaactgcccagggcatcctggcacataggagcagtgccctgctgcaggaaaaaacgtctcaaaatccatcaattcagggcaaaataacgaagaagtagcacatcccccacaggggaggtttgttctttcctaaataacagctgtgggagaagggaaggaggtaagtgatgagatggggctttcctgggaggaccataacttagttataaattataataaaaagacagtgaataaggtttcttgtaaaaagaaagttataagtgagggctggtccttcctaatcaactcgatagggcagagctgcattgctaaaaaattaagctcttcatttgaaaccctgttgggaacttcagggagtttttttctgaaccccccgccccctaccctaggtaaagaaacttctttctaacctttcagtgcctctctcccagagcttgctggattgagtagagatctttcctaccaggttccattacaaaggggacaggaattgaagcccttgctccaaacacagcctctcaccccatgacattatttgcacccctgtccaggtgttagtttctctgggcagcccatagggacctcccaggcagggctcacaccctcctccgtcctcctttcctggctcctggcttcctctgctggctggactgcaccatgctggccgcctcccatttcctccaggagatgcagggcggttgagcttgcagctccctctgcctgaaatgctcttcccaaggccgatggcccgtccgcctttaggtctgagccctcccttccttgagatggcgtggctggccatgcctagattcatctccaacccttcacccggcttatttccttcggaaaaacacagtctgttacttgtttctttgtatgttgtctgtcgccaattccagtgtgagctgctggaggcagagagcttggccatctctgtacatctctgctgtatctatggcacctggagcaggatggcagcctaaaactggggcttgttttagtgagagtgttggtttaacttaacatagcttatcattgggttaaataagatagagttatctctatctttgcataaaagtatgaagtggtaggtgtggggtgggtaggcagctcttttccatgaggaaccggggcccaggtttcttctgctttgttactccactggcctgtgggaagggtgtgtgatccagaagttgctcacatcactaatttccacatcctgctgggcagagtttagctactcaggtggctgctctgagctgcaagggaagctgggaaatgtagtctttatcttgcagccttgtgtccagctacaacttggtgggttttttaactcaaaggcaaaaaggatattgggggctatttagcagctgcagtgcttgatctgtatttgatgaatgaatgaatgtccccatcccagccccctgcacttccatctagcacagcacttgctgcgctgtcgtttagtcagggcttgctcctctctgaatttccagcgctcagccagagcctgggtataatagacacttagcagaggttgagttgaaaaactggcaactgcactgtagagactttaccttaactctgggccattggtgagagtgagggtctgtttttgagaaaaccctgttcgtctgcaggaagagctttccttgtaaatgtagatgaaaatgaagtgtcccattgaggcaggttttacccggaaataagctccacgagccagaagcagaggtgaggcgtgagggcaggggaggccagggggtctcgcatttcttgggagcttaagatctcgtacttcatctccccctcctcaagaaccttctttgctgagtgtcagatgtttctgcttggctttgggacagagggggaagagcttccaagtggtcctattgcttaaacaatttataggccaaataacttccatggtaagggagaaactgatattcgtgatgtattatttactgttaggcaatggagatagaggatgttttactgagttcacactcagacattcctgtgaccattctaaaacaaccagttctacctcatcctgagactgctttaaaagccctttcacagaaggctgtgtggcttgccagaggtgggatggccttccgagtcagggggatctggcttttcaggtctagcattgtcataaaggagcttcggaccctggggagactttttgttttctgttttttttttttagacggagtatcactctgtcacccagggtggagtgagtggggcgatctcggcttactacaacctccgcctcctggggtcaagtgattctcctgcctcagcctcctgagtagctgggactataggcgcccaccaccatgcccggctaatttttgtatttttagtagagacggggtttcaccatgttggccaggctggtcttgaactcccaaccttagatgatccacctgcctcggcctcccgaagtgctgggattacaggcgtgagccactgcgcctggcctgggtttttttaaacctctgagaagcttggttgatgtgtctgtgaagtaaggataattatgcctacaccctgagttgtagaaggggtaaaatggggttgcctaactacaggatcaccccagggcctttatacctgcccttctctcttccgggaaagtccctgccaccatggcttgataagttcctgccagatgagaagtgcccttccatgacctgccagtatgaactggggcagcctccgtcagccctcttgtggaattccatctatcccttgcagcatcgtcccagctctgaattcggtggttcttcttgtgagcgtttgtttcatgtgtgttatagcagctgactcagggccccatgagggcagggaagtctcagttctgctcattgttgcatcccccacacctcaccccatgccgggtatggagtcttaattgccccattggtatcagttgagtcagtgattctgtatgtgacagatgatcagtaaattagagccaatccagttgaatcctatgacaatggcttcctataacatagagggtatttatgatccttgctttacagcaaatgagactgaggctcaaaaacaaccatctggctgttaagtggagggcctaggactcaagtccagttctttggtttctaagctaatcattcttttgcttatgtttatttttaattatttatagagtcaaggtctcactctcttgctcagcctggagcatagtcgtgcactcacagctcactgcagcctccaactgttgggctcaggtgatcctcccacctcagcctcctgagtagctgggaggtcacaggtgcatgccaccagcaggcctggctatttttttattttttttaacctttgtacagctggggtctttctgtgttgcccaggctggtcccaaactcctggtctcaaacgattctcctgccttggcctcccaaagtactggcattacaggcatgagccactgtacccagcttgttaattgtagaagtacctgttggatgaatggtctgcagatgtaacatatgcacatagtttatacctgaaagagaagcagcacagagtggtggttgcgagtggactctggagccagacagctcaggctggactcttggctccgtgacttcctagccgtgtggcctcagccgagttccctagcctttctctgtctcattttactcatctgtaacatgaaggtcttaatagtggtttgttgtgaggactaaatgagttagtgtttatgaataggctggaatggatcctgatatgcaagatataccacttaagtctttattttaaaaacttaaagctgtttcttcagcatcttctttcctgtgagcttttgcaactgaggttctttgattctacagcttggtggattttataacactaaatcaaaaagaatgttgggggatagtcagcagttgcagtgttcacttgaattggttctgattgaaactgtggttgagcagaaagaagcagcaggaagaataaaagccatcatgtccttgcccttgatagattttggtggctaaaacatgacacacacgatgttattctgtctcctaccgggaggcctgtggcaccaaattctcgtcttctcaataatccttgagtggtttctgaattattaatggatgtggtattagcaaaccacaagttccacaaaattgctctagggctggcatttgacaggcaattctgttccctaattttctgcacatatcttaattatgacttcatgggcttgtaccttttaatctctggtttcatcctctggaatcatgggaggcctcactgtctccttttgtctcaggggaatgatagaacccctggtgactgtgaagcagaagaagagtggccaggtgcattggaccgggcttcagtggggcctcccagttgagagtgatgcagaaaattattgttgttgtgatatgtcaaacagtaggggccttgctccggaccagggatgagtatttttcttccataaagggtggccagagagtaaattctttacaccttgtggatctaacgcctctgcttccagccctcaacttggctgtcattccaggaaagcagccagagatgctatgtaaacagaacacagcaatgctcatttgttatgtggatggaattgtgttgcccccatcatttacatattgaatccctaacccccagtgtgaatgtatatggagatagggccattaaggaggtaattaagataaaacgtcattagggtggggcctgtgtgcgtgcagagatgagacagtgtaaagacaccacaaaaaagatggtcatctgcaagccgtggagtggcctcaggagaaaccaaccctgctggcaccttgatcttggactttgcccctctacaactgtgggaagtagatttctgttgtttgaacaaccgtctgtggtattttgttaccacagccctaacagactaatacagttccaataaaacttatttacaaaaatggatgatgggctggatttgactcatggtagagagtttgtcacccctgctctataggactgtcaatattgttattaaatcaggaggcatctcttctgggtcaggggctggagatgtaatggggtgaactgcatcaggcctctgctcccatggaagatcctttctagtgagtgagatagacactcaacagatacacaactgcgtagccaggctgttctcagatacagctgagtgctccgaagaaggcacggggtgatgtgattgggtgaatgctggctggggaagggagatgttgcttgaagtacaaagatctaggaggggagcatcccaggcagagagacagcaaaggtgaaggccagaagcaggagagcttggcagattggagggactggctgtagccagtggggcgggaagaatttgggataggttccacagggacagggctgacttgtctaaactagcatcagattcaaaaggcctcttctgggaggccagggtgggtggatcacaaggccgaggtgggtggatcacgaggtcaagagattgagatcatcctggccaacatggggaaaccccgtctctattaaaaatacaaaaattagctgggcgtggtggcaggcacctgtaatccctgctactctggaggctgaggcaagagaattgcttgaatccaggaggcggaggttgcagtgagccgagattgtgccactgcactccaacctgggagacagagcgaaactccatttcaaaaaacaacaaaaaaagtcctcttcttacccaaatcgggatcttgctctctctcacctcaggggcctccctcccactccttctgtgccccccaaggtctttgttatgctccccctgccccgttccacatcttaaggtcccgctcactgggcttggttagggcaggcacacttccttctctcccatccctccttcctgcccctggcttctctgcatcctcttccctcctggctctttctgcagccctcccagggatggaaccatgagctccaggttgctgcacagtgatccttgaaggtggtggaaagtgaaatcttctgaggcctttgggaaggtatggaggggattgagtagagagacaggttttcagtctcattctggttattggattcaaaattgatcatacagtggtggctagggcaggagcccatcacagagggctagaaacctcacattcagtgattcctttattaaatggaatgtaacttgaattgttcttttccagtttgcctcctacctgcccaggtgagaggaaattcggttacagtgtttctcccagaagttttctctttccactttcctattgtacaggcacccaggaccttggagaagggagtggcggactgtctttaggttaacaatccatggggcagctgctccagtgcccatgcatgggcctgtgaaggcttggctgctggctgtcactccctccagagacacacttgggtgcagggaccttcgcaggccccagatgcgcaggactcagtctgaacaggtggctcccctcgtcttccccctggcttctgtgtgtccttctctgtcttggctcttccgtgaagccctcacaaataagctgtccttacaatggggcttaatgactcattgagagatgctgggagtttgggcagctgggccccacatcctagggtgacttgagaacctggtggcccttcctgtgcctttagagccacagtggcctcaaggatgggaacgtgctgcttgtaaagccataaagaacaaataacatggcttagatttctgtgtgctgccacctaacactctcacttcctcaccctgtgagcaattcattgtgcatttaattaacacctgacatcagcttcacagggactaagtgtgtcttatgcaccgtcttgtgcctagtggccagcagacacaagctgtgaaatgagtgtaaaatgaattaaatgaacattgttaactgggtgaccctggatatgttccctaacctctccaagcctcagtctcttcatctgcaaaatggtgatgctaatgactccccgtgccggggtggggggtcgaaatgagataatgcaagtaaagcattcagcccaggacccgactgagagctgaaaggtatcagcacctgccatttctaccggcctgggggaaacacgcttagtttggatgggagtggtaataacagccttggctgaggcggtggttgtcatcacgccaccgatggaggactgaccttgtgttcggccccacgctggctcttggtgttcttcgctgtcagcggtgctgtgactgagacatccttggcccatttcacatgtgagcccccacggctgcaagagagtgagcttcttccagagagggcggcagagccaggattgaaattcacatcttgctccgagctcatgcacacctgggagcctgcatgttcttgctagattttacagccagcaggcctttgttgaaccgtaagcagcagcggccttgatcaggctggtttttctgcccagaggcccctttggcatcgtgactcaaaattttctctgggtattttgccttcttgctgatgcatcgtttgccggatgggaaccagcaggtagagagtgttggctttctgcctccggtcagagtcgggaacgtgacttggatacaaactcagcatggagggaggcatgacttgggagggcagaacccggcagcttcattcccatcctctgttggtggggaagagtgagcaactcacaggtagaaccaggacagtagtcagggctgtttaaaaatttagggctcctggctggacgcggtggcttatgcctgtaatcctgttcctggaccaaaccgagggttgcgctgcttgttcttatggcccaataacaagatgcagatgaactgggaagagaagaattttttttttttctgtaacgaggtacagggagaaggcttagaaattatctgcagaccaactcaaaattacaaagtttcccggagcttacataccttctaagctacgtgtccacgtgtaagtgtgcattcctctagagacctaagtgatcagcttcttctagtctatgactaaggtctgagtcctgaagaccttcctctagagcttcagtaaatttacttaatctaaatgggtccaggtgtgggcgtgattacccttatcttgtctcctgctaaatcatggaggtttggggagtcccttcagacccccagtaaacttgtttgtggaggcctggggagtttcttcacatccccagtaaaacttgtttaatccttcgttatcttgtcatgcttcaaggcccaggaaaggcctgggcacaactaggggtgggcttttgttacattccagcccttgtataagggcagtagctctctcagcttttaatatttaacttaaccactcagtcagtgctgacacaattgttatagaggcctgtgttagtgagaactggcctgccacaatcccagcactgtgggaggatcatttgcggccaggagttcgagaccagcccaagcaacatagaccgtctctacaaaagtaaaaagttagttgggcatgatggtgcatacctgtagttccagctactggggaggctgaggtgagaggattgcatgagtccaggatactgaggctataatgagctatgatcaccccagcctgggtgacagagcgagaccctgtcttaagaaaaaattaggactcctatcccacctcttcagagacactcatataaaaatacagtgtttccagctgccatttgttgagtacctgttggcggtgagccagactgttgatctgtgatgttgtgttaaatcatcctggcaaggagtgaggtagtgatgaggagggctggtttcacagaccaggaaactgacccgccaggaggagagaagattgtctcggccatagctctctgtagtgtgctctgggctctgtgtgcccagagcagctcagcccagatccacaccacagccccaggtggtcagtatcactgcagctttgttaactatggagacttcaaagcaggaagggggagggatgcacaccctttctcttggaaatttcctggaaggcaagaactgctcgggctcagccataattagttccttggtggcaggtttcttcagcctcccacatgggaagaaacccgagtaggttgtggaaatgcgggttccaggaagccttgcctgacagctcctggctggacgtggctgcatctcgtcactggtctccctgctcctggggagctgccacctctctgcagtcaccttccagtggggcagacacagatgggtcctaaggagagagatgaacaaagtaatcactactgtgctaagacatagtacgcttgagagacagagtaaagggccgaccctgacttcccagggggaggtctccctctgtgcaggtgtccttccaggatgagaaggggccaggcagctggagacttgggcaggagcatagcaggcagagagggcacagcctgtgcaccagccctgccattggaaggggcttggaaggaactgcaggagagtcaccgagagccagaaccatgcctgtcttcctgccgcaatgcctgtgcccagcatgggggctggtgcgtagcaggtatttatttttgtcctgaatgaatgtgaagacaggaagcgctcagccaccatcatcagccccaagctgtgggaagcagaggtcagaggctgggaaccgtgacacgttactggtgcttttttggtgacctcactggagaatacttaagattaaccatgtgtgtgtttgtgtatggatgtgagtgatccctcactcatcccttctagaatgttctgaattgcccactgtgttccaggcagtgtgtcatgtgctggggaaactaagatcactccagcatagaccaatttcagggaactcagtttagataaatgaggccgataagagaacaacatcaccatgcattgtgacaaaatgacactgactcttccttccaaactcaagagttgtgatctaatcagaatcgtgttccaattctttagatgaaaaggcaattgggagtttaagcaaatctgggacctgaggttgccttaggtcccacatttgggtgcttaaaaggatggcggcagtgtttaaatgttgataaacaagaacagaaaaaagcaacacgtttgtttttcgttatctgtccatagagcaaatcaggactgaggcgataaggcctgagcacaacctgttgaagaaaatcctcaccctcctcatctagcctcctccaggaggtccttaccaccatcccggttccctccgctgcctcctccaggtctcagcttccccatgacttccagagtgtcccttctgtcagctgccacactgctctgttcctaccacatcccagtctcaccccaccacagttaccactcctgctcagacctcatagtcccccttagttccccacgcagggaccaaagccaccttgtcttctccagcggccaccctccccctcagaacagggacactccattggagtaggttcactgtgtcctggaggaatgacttcccaaacccagtccgacctagctagagaaaaacatctcagcctttcagaatttagcccccacacttccacctctggaatcacagtgattcccaggccaggcctgggagtgaggacaggtgacctgtgtcaagggcatatgacgtcatctgtcatagctatttctttcttccgtggaacattgttgcagagcctttgagagagcggggggaggagtgctttgtttttggagctgtgcaggtggttgagagattaggggatgagctccagtgagcagatgagctcaaagagggcgctgagagctgggctgaaagcgcacgctggagtgagtgtgtaagtgggcctccaaccagcctgtggatacccaggtcttatgagggccccggggagaagaaacttgggcccaaacagatggcaggtgtaagagtcatagatctagttctcagaggacaaacacatgctaccacccactcaaagagcacaggtcctgatgggacttccttggtggggtggggaagacagagagccggggatatcacagctgtgccagggaggtggcccagcgtggatgagctttgggatttgtgttagttagggccccgattctggctgactcaaacatcaaagcacctgtcgtggttcacgtgatggtgaagtccaggtaaggggggattccagaggaggttcaggctgtcgtcggggtcccggtcctgtgtctgcgtgacacagtcctacctggttcccttcactggaggaaaaatggctccaacagtgccaggcttctccctacctgcaggttgagaacaaatgcttgtccctgcgtcctaagcaggggacctagggtagaacccataaggccagtcacgctagtgatgggagtggggagaactccctgagtggcctaacctacatcctgtgttccacgctggagctgggcgaggagtcagcttgcccagaactgcatagggtctctggtggaaatcaggggctatcgcaagagagggcagggaggggaccctggactccagcacctagtgttcatgacagttctcttgggattctgtcccatgtaaagtacagagtctagtcctggatttgagaaacttctctgatcacatatccaattgttaaaaagaattgtgggttactgcaatatacatttgtttgtttgtagtgtacatagattctttataatatacaaaacaaaaatcaggaacttattaaagatgatgaatagaaactaaggtggagttctaatactcctttgggtaacttggggatcatctcaagcatcctgtgctggagacctctattaggatgcagtcactggggactaccattaggacgcggtcgctggggaccaccgtcaggacttggtcactggagaccaccgtcaggatgcagtcactggagttactgggggaccaccgtcaggatgcagtcagtagggggccactgtcaggatatggtcactggaatcactgatgaccactgtcaggatgcggtcactaggggaccactgtcaggatgcggtcactggagtcactggggaccactgtcaggatgcggtcactggagtcaccggggaccactgtcaggatgcggtcactggagtcaccggggaccactgtcaggatgcggtcactggagtcaccggggaccactgtcaggatgcggtcactggagtcactggggaccactgtcaggatgcggtcactggagtcaccggggaccactgtcaggatgcggtcactggagtcaccggggaccactgtcaggatgtggtcactggagtcactggggaccactgtcaggatgtggtcactggagtcactggagtcaccggggaccactgtcaggatgtggtcactggagtcaccggggaccactgtcaggatgtggtcactggagtcactagagtcatttctgtgctgtggcattttaatgtcgttactttgagtcattccttttctccagtcgtgagttgtgctgtctgcccaccactactgatttaatattttctttaaattttctctcactttttacctaaagtaaactcatttgtaaagaaaacgagcatcatttgccatcaatagaaaaataacttcaaaagtaccatgatgaatacaaaacagtaggttagtgtctagtcagccactgtagtctgcctagaggttttaaaaaaaaaaaaaaatggtgaacaaaggttagcaggcaaaggcagatgagcctcgacttgaaagactgagaaggcatgagaaagggaaaagctttgtctggcatccagcattgttcactgtcgtatccaggcaccacagaaaaccatcttggtttccgagttccatgcttggggagacactggtggggtgattaagggtgtgggcactgaagccaggtggcctggagtttgagtgccatttttatcccttccctgtgcctcgtcttcttcatctgtgatgtggacctccctcccagagatgttgggactagatggagcagtattttcaaatgtcttcatgtatgacatgcagttgttaagtactaacttttattattactggtttaagttgttgtttaaactgttccagactttttaaggaatattttcaatttgaaaatatagagattgattgtaagtgttctgtgatcaaactgatcctagagaagaatatgacgtactccctcaatttatccatggggcctgagatccagccagtctgcagagacccagattggaccatcgcagtgtgctggggtttgtttcctcatgtgattataaactttcacatgagactgggacctgttctaggcatttttgggggtcattccatgggcttttgggggggtcccatgagtttacattgaggacagcatccttggagcctcagaaaactgagcagcccatcaccactggtctctcggtgctgcagaggcaacttggatgccagcaagttccaggccagtggtataatgaggcatgaagtcccaggaggactgggaggaagacaggagtgtccaaacaggatgacctttctcctctccagctgattctcgccctgtggaaatgctcttggcatttcagtgctggcatctgttttttgtttgtttgtttgtttgtggagatggagtcaggccatgttgcccaggctgttctcaaattcctgggctcaggcgatcctctgcctcagcctcccaaagtgttgagattctaggcctgagccactgtgcctgtcaatgttttcttttttaaaattgtactgggtgagcaaaacctgtttgcaacctctggtctaagcccatttgtgaattgatccccttcccctctcctgctacctgcattgttgactttaaagctctattctcggcccccagcccatctcctagtccctttgatgataaacagtgccatgaacacagctcagagctgacaaacgggcctcctgacccagcaatccatctatctgggaggttgctgaaaaccgaaacctcccaggctacccaaacacccacttctgaagcccccaaactccactaggtaatgaaagatacccagggaaattagaacaatgacaataaaaacagcgtttcaaccgggacgcaagctcttgggtggctttactcaggagggttttttctcccactggccctttatataattctccacagtgatgggtatattacagcaatcttgtagaacgacagccttgtgaaagacagaaaacaatgtaactgcccccagtttttaactgactttcctttgcaaaattttgcccttcgctagcaatgtatcccatctctacttctgcaggcccctccctaatggcaagaaagaatagaaatctgaaatgtctgcattttgactatagcccttccagtgtgaccctctgaaaggcatttttaagaaagagcagaaatgttggaatgtcacagacatttatttgcatggtatcataacagattttaatttgacaaggaaaccgcctaagaggaaggattgaaaagccaatgccaggtagaagaggtttcctttgcgaaaattatttaaatgcattctggcagctcttatttgaaggttaattgtgattccgactgttagggaaaacctaattaacaataatgggaaaaaactacatttaagtaatattaaggttgtgacaagcattttataaaagcaagaactcattgctgaagtttagacttgctcttccaacctgtggcccattgttctcaggtagtgaagcagataaaatgcattaattaaatatttggaagcactttgctggttcttcttatttattatcttgtgtgaggttgacatcttggcaatttctgagaacaaaagaatatacagagaagtagatttgctccttattttatcagcgggattatatttaaatataatttttggccaggcacagggggttatgcctgtgatcccaatgttttgagggtccaaggcaggagaattgcttaaggccaggagttcaagaccagcctggacaacacaacaagatcctgtctctaaaaattttttaaagctattagttgggtgtgggggcatgtacccgtagtttcgactgttcagggagactgaggcaggaagattgcttgagcccaggaggtcgaggttgcagtgagctgtaatcacacactgcattccagcctgggcaccagagggagaccctgtctttttttcttgttttttgagatggagcctcactctggtgcccaggctggagtgcagtggtgcgatcttggctcactgcaacctctgcctcccgggttcaagcgattctcgtgcctgggactacatgcacgtgccaccacgtctggctaatttttgtatattttttagtagagatggggtttcgccatgttggccaggctggtcttgaactcctgacctctcaggtgatctgcccgccttggccccacaaagtgctggtattacaggtgtgagcccagccaaataaatatatagcttttttgtctttttttttttttccctgtccaggtgtgaggggcagtcaggttgggaggggccctggaagggttgaaccaggtgggcatggcatggaggcatgagtactgggcaagttggcaaactttctgtaaagggctgtgtcggaaacatgtccggtgtgatggccatgtggtctctgtcacatctgctcagctctgccggtgtgtctcacaggcagtcataggtgatacataaatgaatgggtgggattgtgttccaagaaaactttatgtgcaaaaacgggcactggggctggctttggcccggggctgtaacttgctggcccctgtgtggagtctggaatctggtgacctaggtttggatttaagtcactcccaagtctccaatcctggacaagtttctctgtgctgttgttttcttggagtacagtggatattatactagcttgtggtactgtggtgcaggtggcactgaggctggggcagtgtggtagggcatgggccactgggccttgcgggaggtgtgaggtgggggcaaccccatttggttggaacgtggtgctttttattactgtgggccaaggtccgaggcatttgggaaagactggattaggaatgggggcagctgctgcagttggagagaaacactgaaggctttgggggcgtggctgatgatggggttgaccgatggggctgatgggctgctgggttgctctgtgagaatcggaggtgtcatcctataggaaccacatgacccctcttcgtgggtccctttatatcctgttggacaacctctgtcttccccctgtaagtcaataaaacagtccccctggcttaatttcatgttttttgtgtcagtcatgttactgtcttggtcagtatcagtgaaatcgcagcccccataaagcttcctttctagtgatggggtctttttaagcttctgagtgacatcagcctttgtagcaggatgggcgtcctgtagtttgaggagattggatggtgtattaattagctagagctgccctaacagagtaccatgggttgggtgtcatcacagaaatgtatcttctcaccttccggaggctggaaggctgagatcaaggtgtcggcagggttgttttctgaggcctctctccttggtttatagacggccgtcttcccactgtggtctttcttctctgcatgactctgtcttgtccttctaagaagaggagattaacagtcgtgttgggttagggcccaccttaatgacctcatttacccttagttacctccttaaagcctctgtctgcaggtatagtcacattctcaagtactgggggtttggatttgaacatgtgaattacggggtgacacagttcagcctataatagatggagttgcttggcacatggaaacagagccggagagagacagagagaggaaaccagaagtcaggctgttgatgcttgcagggaggacaggcaggaagggtcctaaattgggtcccctgttgaggtcactcccatgaggtgaccatttgggattaggtctgagcatcattctactgagggccaggtggacagggcccttcctgccaccatcctgctcatggcaccgtcctgtggatttccgcataatctccgtgtggagttgaaccccacccggagaccatattcagacactgtcagctggtggcatgagcagtgtcacaaagtcagactgttgtgggtttctaaagccagcttaggcaggacaccactttccagagcctcgggttgcccattggtaaaatggagctgcacatacctctcccttgtagtcgtgggaagattgagaatctgcatatggcacgtttggcacagtgcctcccgcagagtagacctcaataaactctagttgttcttttatcctagctgttgcttttattattttactactactgtttgtattaccctcagccagcgatgtttctagcttgttgatatctcttggcctttcagctatagattatttattgtagcaactaacttgaaaagtgatgcatttgtggtttcatgtatcttagaagtaaagaaaattcttctacaagccaaacagaaagcccttggctgcctcacatccccagtgacaatatttttcacagtgttaacaactcttagaagcacaggctatgacctctgccccaaagcacttgactctcagccagggtgaggctgtgggcaggaggacttctggaacatgagtgatacctgtgtgcccagattcctcgttctctgtccccagaggccttggttctctgacttctcggtcagctccactgtcttaccacattcaaacctttcttggaaaagaatcgttcatcctttcacttggatgccctctaaatttgaacacatttctatcacagtctgctaagtcttattttcatctgtgtatctctccctgttttactcagacttttttttcattattgccacaaatgcttctttaaatgatttaggcaaagatggagttgattggctcatgtaacagacaattctgagaatgctggctgaaggtatggctggatgtgggagctgaagcgatgtgatgtcgggacactgtctccctggttccctgggctcagtttcctatcttggcttcatccttggtgggcttttcatctacagtgacaaaataaccccctggccaggcatgatggctcacacctgtaatcccaacactttgggaggctgaggcaggaggatggcttgaggtcaggagttcaagaccagcttaggcaacatcaggagacccagtctctacaaaaaatagaaaacaaaattgagctgggcatggtggtgcgtacctgtggtcccagctactcaggaggctgaggcaggaggatctcttgagcccaggagttcaaggctgcagtgagctatgattatgccactgcactccagcctgagcaacatggtgagaccttgtctcaaaaaaaaaaaaaaaaaaagtgaaaaaatacccccagtagctctaggcgtccatctcagcagcttagcaactgtaggcaaagacctgggatggatactgggttgctactagcagctgtgtccagttgaactctccacaggcaggtgctggcttactgggttttgtcatcccagccacttgcatggtgcctggcacataaaccgcaggactgaccagtgttgtctggtaaagataatttggttcctagctgggaactagccctcctcttaatggtttttatgattgtatttttcagtggcataaatgattggagagtgatttgtaccccacacagccctatgcaataaacaggagtgtgtattaccttcgtgtctatccatgccagctgctaagcatgtttttctgctatgcgttggctcacagttcactggcaacgagtcctctgcttcagatcactcaggtgggattgaggtgttggcacacatgccaagtggcccttctcttttcagcttctgttgaatgacttgacttgtatttttcagacctgttctttgaatagcacaaagatcactgttcctctttgacaagagctgtttttttctgaagggactaagacgcgttaacagttatttataccctgtcttgttccaaaaggcatttgagtggcatatcttacagataggtgcaggagcttgggctgttgcgtctgagacactatcctgatgggcacactcctcaacatctctgaacctcattttccctgtctgtgaaatggggataatgaagacccattgcagaatgttgttttgagaattaaataatttacagcttaagtattagtcacttttgttgttgttgcgggaggctcaggatcagtgatgtgaaacagttggcctggtgcctgggacagagatgtgctcaggaaatggtggtccccttgtggccttgagtaaacgacttaacctctctgtgcctgtttcctcacctggcgaccagcctgaccaacatggcgaaaccccatttccagtaaaaatagagaaattagccaagcatggtggcggacgcctctaatcccagctactcgggaggctgaggcaggagaatcgcatgaacccaggaggcagaggttgcagtgagctgagatcacaccacggcactccagcctgaaatgggcttgacggtcataagtaatgatagttaacactcacgcaatgcatctgtgagccacgctttcactgcgaactgtttaatcctcccgacagctctggacgacaggtggtcaccattgtcacctttttacagaatatggaaactgagtcccagtgggttgaaatagtagcctgaggtgacatctttgcaggcagcggagccaggcggctggaccccagagccctggttcttaaccagcacgcgagtcctggcggcgcttgtggcaggtttcagggctgagggtggcatccttgctcccagaaaatcacttcagatatttttaggcctggattctatttggtcactcagcagcccagtgtaggtctggcggatggaggagtttgggtgcagcttcacgttcagatggaaaagctggtcttccctgcacttgcctgcaaaggctcctggggcagagccctgacacagaatgtggttggccactccaggcatgctagccccctggcttataggctgcagaaggcttccttgactgttgtccacacactgggagcaattcagtttctcatcttctttgggcctctgtagccaactacagttccttgcttcagagcctgtgtctgtgtttggaagggggctgtggattgcaccccatgggctcctaccttgaatcctctgctggtatgagcttggcaggcctgactggcccttctccagagagagctttggcctcagctgctgagcccaactttccaggctgctgggcttggctgcccggtttcactcctagaaactcctacacagagatcatgagatttacaggacagagccttctctacgtgctccaagtgggtcccttggtcatgcatttcttgggcctagcttggtaccagaaaaagacacagaagctgtctaaactttgatttaatttttattcatttttacctggtcttattccaaaaagcatttgaagcagcatagcgtacgtataggtgctgagagcatgaggtgttgtatctgacacactgtgtcattgtgggcatgttccttaatgtctctgagcctcagtttccccacctgtgaaatgagaacacagaagacctgttccagaatttttttgtttttgagatgaagtctcactctgttgcccaggctggagtgcagtggcagcgatcttggctcactgcagcctctgcctcctgggttcatgcaaatctcctgcctcagtctctgaagtagctgggactacaggcgcccgcctccacacctggctaacttttgtatttttagtagagatgtcgtttcaccatgttggccaggctggtcttgaactcctgacctcaggtgatctgcctgcctcagcctcccaatgtgctgggattacaagtgtgagccaccatgcctggccagaatattgttttaagaattaaacaatttggccaagcacagtgaatgccccaggaaccttagcaggcaagtggtggcgcacgcctgtagtcccagctacttgggaggctgacacaggaggatcgcttgaacctagtaggtggagcctgcagtgagccaagatcatgccactgcactggagcctgggtgacagagcgaaactccatctcaaaaaaataataataataaagaaataatttacaatgtgagcattacttacttttgctgttactgatgctgttattaacattattactattatcctcatcctagaagaaaattgatggtcagggaaaatgaactttcacctgactcagagccaggtgtgcgtgcggtgtgtgcacttgcgtccttgtgtgtgtttgtgtgtgtgtgcacgggcatatgcatgcacaagtgcgtgtcttcagctcgttgccaaatggttgcatctggctttcccctgcatgaagctccgtcattttccatagtttctgagcaaattaactttggcatctagctgggttgctcatttgctagtcgtgcctgttaggaaaggcttgttaaagctgtgttattggtggcgttttaaaaatgtgttactctctttgtgcgccttttgcctgttaaagtgatgactctatcctcccccgtcctcgtcatattgaaggccatgatcacaaagcttgaggaagacccagtgctgcatggtggagtggttgtgagctcccccgaggtccatgggcaggtgcttttgacgctcaagaaccccgtccttaggcccaccttccaggtccacctgcatcccagcccctggccgccaccagggttgggcacctctgtctttctcttatcctcccagcctgatctctagcacttccccattcctgcccttggttcttctggcctctggtctcctcgtcagtcctcacggtcctgtctgctcctctttcatttcgtcttggctgctgttgcccgcctgcttcgtcactccatgtgccctcgtccttcaagcctcacctccaagctcacttctctcctgggcccgctttgagaccctcatggccacccctgctcgtgcggttagtgtgcatgtacagacgctccgcaggcagtatttcagaggggaggaaatggaagaagggaggaaagaatgaagggaatggagtatttagcatcctggatatttagcagtgtgcatttgttcattcacaaatgttttgcaggcaatcagttaatttttttttttttttttgaggcagagtcttgttctgttgtccaggctggagtgcagtggtgcgatcttggctcactgcaacttccgcctaccaagttcaagtgattgtcctgcctcagcctcccaagtaactgggactacaggtgcgtgccaccatgcccggctaatttttgtgtattttagtagagatgggatttcaccatattggtcaggctcgtcttgaactcctgacctcgtgatctgcctgcctcggcctcccaaagtgttgggattacagacgtgagccaccgcacctggccgcaatcagttaatttttacaactcttaggatgttggtagagttttccctgtttgagagagaagaaagctgaagctcagagattaagtaatttgatcaattacatctgatcaatgatcagtatgggtgtgctgaattcagtgtacctttgttcattcaacaacatttatcaagcacctgtgatgggcctggtgctgtctaggtgttgggcttgtagctgtgatgaagagggtgtgatttcctcttccccagggctcccagtccggactctctaatcttttcatggctcctgataagaatttcttcccaagcaggtgagaaggtcttattacttcagccattatctgtatctctcacagagcctatgtcctggggactgggcaggaaggagggtcctaccctgtaggatggctgaggtagaaaaggccatgtttagccaggtccattccagttattctcagagacccgaatggagaatgacaggtgtggctgccaggcagatgcatcccgcgtttccgtgccctgcatttatctttgccatctcactgaaatgaatgtaacctcatggggatgttccttgtcttcccctgtggctgatgggtgtgtttgttaaatatctgggatgtttaatttttagacggccttgtagggaagcgaaaacatggctcatccctttcagctagacgtagggaaacacttcaaagacactgtcacctctgaagccatccactttaggtctttgaggttttgagtaaagacaagtgcagcaaaatgacaaatgttggtttaaaaacctaagcagtctggagatctttgggatggcatgttttgaaacaaagcacaccgccaaggaactcgcttagcttggggcaactttcacagcaactgtttgttggtgggtcctttggtagagaaacatgagagactttgaggtctggggcttcgcttttgtgaagctctgtcttcctgtgtaggtgagtcccaccttggggaaaaaaatcatccccgggtgcattcgaatgttcttttgtgttcggcaccgtgcaaaccactttgcatgaatgatttcacttaatcttgatgcataaaacagggacacagggatgctattctgatgacaaagtatccttccccgcaaacattatgggacccctttaaatcaaagataagaatctggcatcctgggctgcatatagcccatagatctgtttgatttggctaattcggtttttaggattgaatttattgacaatgctgaacattcgggccatttcccataaagctcactatttccaatttcccttgagaaaatggaaagctcccacataggtgggtgtgttcacttggggctcagtagtggtggccctgttttcaagagggcagtcctcaccatgtcaccccatccccacctagcctgcttctctcaattattttacctgcctggtccctataggcatttgtgtcagccccttttgctttaagttatcagccccagagccttttttttttttttttttttaaaaagcaacagtctttcaaatttgatgtcatacacaaacctttgggcctgtcatcgactgagcattccgtcagcgaatatgcgtcagaaaacaaaccctgccaagatgcatgtgaggggaggttgactgtcgcttcactaccgttcctgtgggaaatgacatcatctgcagcaggggagcaggacacttagcagcacttcccagagtggtgtcccaggacagaggggctgcaatctccaggaaggtggatcatcatctcgctattgtcttaaatgtctgagttatagatctttgagggccttgaactccaggacagcagggaggtagggggaggagtcatccagacttggaaaagattctttaattttacttgaagtgaaactcttgctgctgggagtataagaattcatttcatcaagcaaaaaaagctcaaatcagtgatgtttagtggtgactataaggccaggtgcagtggctcacacctgtaatcccagcactttgagaggccaagatggaaggatctcttcaggtcaagagttcaagaccagcctgggcaacatagggaggacccctcccaccccatctctacaaaacattaaaaaaattagctgggcatggttgcatgtgcctgtattcccagctactcaggaggctgaggtgggaggatctcttgagcctaggcatttgaggctgcagtgagctacgatggtgctgctgcactccagacggggtgacggagtgagaccgtgtcagcgttgggggtttgggggaagctggtggtcatgatgagagcagccaatgctctttgcatttctttatgtgctagacagtgtgttaagtgccttccccagattatttcagtgaatttttcacaataactcagtgaactgggtaccatagttatccttcccgtttactaatgaggacgccaaggcccaggcaggatcaccacatgctcaagctcatgtggctcatcactggcaggatcaggatttgaacccaggcagttggactccacctccaccgctaccctctcctgcttcctgtgggtcaaggcacatccgggaagacagtctgtctgggtctgtgtttgtgacaacggcccagcacttgatatctttatgaaacccttattaaatcaaagaagaagaaccagctggcattttgggacatagagaaatataatatttacattttaaataaattaggccatcaccacagacccagagacattgattattctcagagtagctaacaggaggttgaaatggcttcatattgcgggtcttccagcctgtagggagaaagctttggtttggcgctcactgtaacacagttaaagccaaggtattcagaatagactctctgctcagcatcctgcgttgacacagaagccgtaaataaatttgatggcagagcagttcttggcaagaatttaacaacaaatcttgacatgaaactgtgtccctgctgccctgtgtctgtcaccgtgttgttgagattggcctggacgtgttggcacgtttcactggatggtttgtgttgcagtcatgcccatagcttaaaattttttcccctcagagaaaagatattggaatactgtgttttctctttactcagggtttgcatttggagtggtgaaatttgcacttcattgtatattctgaagggttggcaagtgacaagtcacctgtccttccattttagagatggaacatcaaggtatgagagaactctgttggctgagtacagtagctcatgcttgtaatcccagcactttgggaggccgaagcaggaggatcgcttgagtccaggagttggagaccatactggccaacatggtgaaactccgtctctactaaaattgaaaaaaattagccaggtgtggtgatgtgtacctgtaatcccagctacgcagaaggctaatatgggaggatcacttgagtccaggaagttgtggctgcagtgagctatgatggtgccaccatactccagcttgggcaacaaagtaagaccctgtctcaaaaacaaacaaacaaacaaaaaacagacaccacaagaagccttggaaggcagagggactgggcatcattgagcaccagagttggccaggcctgggagatgttttctcagtttgatcttaaccatcttgggcagcaggtagtgctaaactcttttacagacaaggaactgagtttgcataaagcatgtcaccttctgaaggccacccagctggcaggtgatggggctgggaggcagcagtaggtttgtcttccctccagaggttccttttatgtcacactgtctccacagttgctggagataggtatattaattttttttttttacttagctatattgaggtataaatggtaacgggaaattatgtggatttaaggtatgcaatgcgatgggtgttttgttgttgttgttgttcaagacagggtcttgctgtgctacccaggctggagtgcagtggtgcgatctcggttcaccacagcctcgacctcctgggctcaagtgatcctcccacctcagcttccccagtagctgggactacaggcacgtaccatcatgcccggctaacttttatattttctgtagagacgaggttttgccatattgtccaggctggtcctaaactcctgggttcaagcgatcctcccacctcggcctgcgaaagtgctaggattacaggtgtgagccacttcacctagtcacatatctcactttgaagaagaatacttgcaaacatgtgacccatttgccccagattttatggacgaagggaaggattgtcattcagtgacggtgatggcgtggtttccctggccgagtgaggacaatggcctcatggagaaaccctgagattttgctgccattgtcagcatcttccctcatcatctcaagtctgggacagtcctctttatgtcctgggtataaaagctccgaagaagaaaacaggttgcaagtggaagtttctgcagccgaggaacggtcgggtgacacttccatggccctctcacagccgcttcaccttgaaagtgctgcggtctttgggttgaatccaggttctcttcacagcgactgccagaggagccgaggaagcacctgcatttggagctattcagtgcatcctggaaccggtgtttggcttattttcttagcataagtagatttctacctaatgggtcatcagtgttttctggggctgagtcattagggaggtgggaggcggatcaattgtttagaccagacatcgcctctgcagtttgccgaaaccacggcttttgttttctttgaaaaggaaaatgttggagtccagtagactttcttaagcagtgtggaggcaactcatgagccgtggggttgggcgaggaagggaagtacactctgttcagaaccctggggatgttcagaaccctgggggtaaataaggaagctcatcggggatcagaccagcagagggactgccttccttggctgccttccccccgggaggtattcccgggaacaaggaagctcatcccctcttaggttctcaccgtgcatcaggcgttgtgcacaggttcccacaaggggtgtcacgttctcctcacagcttcaggaaatctgtatcattaaagtttccacttgtagatgagaaaactgagtctcagaaaggctgtgtaatttgtgtgaggtcacacagcagcattcacaccaggtctcccagaacacacagcccatactatatccccataggcaaatcagaaatggctagcttgataagggacatcatccttgacctgttgccttcctgggtggcaggggcctgggagatgagactctatggaatctctccctgcagacccctaccccatccccacccccagacccaccttccatgtgggaggcgcttgtggaatatttattgattgaaagaggttgaaagaaacatgtttaacaacatatggcccaaaatcataacagtgtttccagatggaggattcatgatgctgccctgcagcttagagtcccccagattaggagtgtcacatggagggagaggttaaacttgttccacctgtggccgtcatgggctgtcctaggactacacacagacaactttgaattcagtggaaagagacctgcgccatcatgactgtttcataataagtggcagccgggcatggtggctcacacctgtaattccagcattttgggaggctgaggcaggtggatcacctgaggtcaggagttcaagaccagcctggccaacatggtgaaaccccgtctctactaaaaatataaaaacaattagccaggcgtggtggcgcatgcctgtaatcccagctacttgtgtggctgaggcagaagaatctcttgaacctgggaggcagaggttgtggtaacctgagatcgtgccattgcactccagcctgggcgacagagtgagattctgtctcaaaaaaaaaaaaaaaaaaaaaaaagattatgggtagtgagtttcttgtgagtggaggtgttgaagcagaaactgggcagttacttggtggctctgtgagtcaggactctaatccaaatgacagaaaactcaaactgggcttaacaagaaatgaagctttttgagtgatgaaaactggacatccaaggattggtgtaacctttggcagggttgcatccagaggtcagatgagcaaatgtggatgttctcttcctgctgttgctctctgctttcttttttgtggtcttcattcttaggaaggctttctctatatgtgatggatcctagcagctccaagcttatgtcctatgagcttagcaattcttgtcatgaagagagggtttctctcccagtagctctaacaagattcttggaattgactcttattggcctgacttgagtcttctgccatccctgaaccagtcactgtggctaaaggatgaaatacactcattggcagggccagggcacgtggccaacagtcagtgggggcgtttggtcagcttccccagatcactaggaagagaggtggtttcttaagaaaaagcaggattccattagccaaaaaagaggggaattcatcttgggcagagagaaaaagagagatgttcaccatgagggtcactgaaaaagggtcttttagcatcaaatgaggaattggagacgatcactttttagatttaaatccaagacataatgatcaggtttagtttcttagccaaaaattgttttctttttcatctttgttttcatcatcgtcatcttctccatcctcctccccttcttctccttccctggagaaactaactagaatggaatgcagctgtagaaatcctggttaatttctcagatgcagaatctggtctctgcaaaggaaggagaatttctattgaagcccaaccttttgtttgaagtcctattctctgtaacggggcataaagacaatgttcctcagtcagtaagcattcctaaccttgagctctaggatgtaagctcagaggaggaaggagcttttatctgtttgttccctgttgtatccccagtgtctagacagtgcttggcatgtaatagtaaggatggatggatgtgggagacagaatgggaagagcatggttttgcattgaacagatttgtgtttggagttctggaaacgttggtctgtgagtcatctggagcagagtgaccacttgggggcagtgtgaggttattatcagtaacttgcacctggtggccaggtagacaagaggctagaactgcgagaacagtcgggagggaccagaagggacgatctcccctgtctctctttcacaaccccggcagcaaacatctctaagagtctgattaggtcacccggagcatgtggtatcttgggcattgaagcatctttgtgggttcttgaaggtctgagatcctccagtggagagtgttcctcagtgtcccgctttatagccttttacgtggagtctttgccttccatccactaaaggggcccctatcctttgtctgtcaccactggcatctttcctctatttacttcaccatgaggttatgagaactcatcctacagtctcttctaagcccctatttccttacctgtagaatgggcataatgccttgaagagacgtgatgattacagtgaaggaatattgataaaggaccaagaagagtgtctggcctgtggaacgcatccaacctatggttactattattattggagcccaaggagagatttgaattgtatttggggctttcacagacaaactcattagaaagtactgcctgggcccatatagcagacagaatacaagtcttgtgatggatagacctgggttcaaattctgacttcaccacttgtgatttgtatgaccttgaacaaatgatttaatgtgtctgagaccagtttcttcttgggtaaaaggatatcatgatacctacttcctgtggctgttgcaaagctgcctttaacaaatgtctttggcctctgtgcctttcctcagactttcaggcccattgtgagagagctaggaagatacagggttgtcaagttgacacatgtcagaataggattggttctgccacagtaacaaatgatcctcaatctcggtctttaacaaaataaaagcttatttcctgttcgtatgtgtccaacatgggttgcccaagggcaacagtgggactgttctgctccacataatgactcagaaatctaggtggacagaggctcccatcttgtggccacaccatggctttctcacttagtgttacagggaagggatggtgcagggtcacacgccagcagtcctatgctatgactcagaagaaacatttgtcacttccacctggaactcgttggccctaagtcagaagcttgtgccctgttgtgcagagggggctgggaagcttggggagcaggtagggtgcatggtgagcaccagtatctctgccacaaggacccacttgttgtcttcatgacattcccattgtagggattagagcagctgtgggctagtgactccgtagctgccaggtcatttccagcacagtgcttcgtgccaggaagtaaagaaatttaggcttgagaccccagcttcatagatgctgctgagaacgtgaactcttttacctctcccagattctgggaggtagatgtggtcttgtaatgctgactgttgaatagaaaacagaagaagatcacatttgatgagccactctgttgggggtggcctaggcagggaagcattgtgatacttttgcacttaccttcactgcgtatatcatggggatatgagtcacccagagaaaaagttttattgcctgttgccctctgcaagggaagaaaagtcacagatgtctgctgcatgcctcctgagggcaagagtgtatgcttggcattttaacatacaagatctcggtcatatcttcagtgtcccatggagagaagagattacagtctccatgttgctgatgaaaccatgaggcttaggggtgttcagagctgtgtagaaacaatggctgccccgttcatgggacacagccagtgaagtgtggtcccagattcaagcccttaaattccatgttgttgttttaaactataccatctcgtctttccattgtaatgtctgtggggcttaaggaagttgtagggatgtgcccagttctgtgtgtcaatcaaagctgtaagaatcagaatcttgtgtcttttacgaagcttgagttgtatattggctcatttagtcctcataacaacgctatcatgtaagagctcctatggccaccatttttcagatgcagaaactgaggtccagagaggttgaatgatttacccaaggtcacccagcaagttactggcagactgggacagaatcctggccgtccagctccaagttcatcccccagaccagtaccccacagtgctcgctcacatttgagcacagtcttccctctgtccaggtgctggtgttcatgaattactgcttggcacaaatgaatggctgcataccccttcctgggaggagcaagccagcctttacctgaaggaggctcttggcagctttacgggagtgctgttgggtgtgagaaagagactctcaaaggaaaacaacattttgatgctcataaaatttaatgttctttcatttactgtctttctcttgaaacttggacataatttattgagcccgtggttgaaatattcaggaggtctctgtgtgctacttcgaagggaatatgattaaaaacgcacaccagcctccactgatttctcaagacatgagaacacgacaaagagccacataatttcagaattcacatctttatgtgaaagcctgtgctttccagcaccttgcagaatgaatggaaaagcagcacttcagggtgaaatgttttccagaaaacttctgacttggtgtgctagtgttagcttcacggtactaaataacttctgtgtccagcaacctattctcggagataaagagaagctgccccaggccctgtgccaggctggctgctctgaagtcacatcttaaccatgtttaaaatcctgctcgatacgatggagccccactttatagccgaggaaatgggagcagatgaatgatggggcttgggtgtgaacctgttctcatgcctcctgccagctgacctcttcctgcctttggcctcagcttagtatcacaagccctaggacgggtagctgcctccccttcctgttcccagggaccgtagtcttcctgctgtgccactggccactttgtctgagaaccgttgaccacctagatccccacgagatagggagctctgtgagggcaggggcaggggcaggggcagggtccttgtcacactgatgcccagagctcagatcagtgcctggcacaccgttgctcaataaatgtttgttgaatgaatgaagaaacgtgaatgaatgactgaataagtaaatgaattagtgcttccaggcctgtgcagggaggtgcatttgacctcttctgtggtttagctgtgtccccacctaaatctcatcttgaattgtagctcccataattcccacatgttgtgggagggacccagtgtgagataattgaatcacagaggttgttcccctctcctgttcttgtggtagtgagtctcatgagatctgatggttttatgagaggtttcctctttctcttggctctcattcactctcttgtctgccgccatataagacatgcctttcgccttctgccagattgggaggcctccccagtcatgtggaacttgtgagtccattaaacctctttttctttataaattacccagtcttgggtatgtctttgtcagcagcatgagaacagactaatacaacctcacaaagggagagggtttataaaataacccaaagcagagagagattgtccagcatggtggtgtgagaaaggactctggttccaatcccacggcctttagtgttagctttgcctaggactaaacctccgtgagcctccatttcctcaatctgtagatggaaccactagctagaatatagaaaccatgagggcaagagtctctcttgtttgctgctgtatccatagtgtttaaaacagggtttggcaaatggtagatgctcagtagatgtttgtggaatgaatgaataaatgaatgaaagaatctgagaattttcagatattgaagataagtttcttaagaaggagccatggacaggccttgtatggataagttaacacaaggatggggcttagggttgggtctggcgtccaatacatgctcagtaaatgtttgctcttaatgacagtggcctcactgtatcctcctcttcctctttctcctcctgggctgcctgcccagcaggctggagaaggctttctgtgctggggaggagaggaggccaacgctgcgctgccttctaactcccaggtcttgggaaatcaatagccgtcctctgcaagccagcctgtaaccactgtgcttttgaaaggagaggccagcagagcctttttaaagtaattccggccccattttcacaggcctagccgagcaccatgttttgtgcttgtgatggaactataattacacccattgtgtggcgccaagtaaaccacctcatatgctacgtttaaggaaagaggcctctgcccctttttccgctgaccctcccataatccatgcagcagaaataagccctacaagtgtctggtgttgtcagtggctttggcagtgatctccagtaacacacgtggagttgggtaagatcctgtgctctgcgctagagctgtgaactgcccaggagacattaccatctgcagaagtgcatgctacaccttcttctgggggagcctcatgtaacagatagaacatgggtctgggcgttagctactgcagccatctccatgtgaccatgggcaagtgttctagtccctgtgggcctcagtttcctcccatataaaatagggacaacaccagcacctagtatgatgtctaagacttctgtgtgcggttgtgcaggttgtacactgcacaacagcttatggctctggggggaccagtgggagctctatctagccgtgctccactcaccgaactcagatatcatgggtctgtggccagttggagcacttccttttattgcatgaaagagcctttatgtcatacatgacgtacttgacatttagtaagtgctcagaaaacagtaactgttgttgccactactactgggggatgatctgtggaggaggtggatgaatggatcgaaggcgttgggcaaggagatcaactgagatttgagtgacgttgtgaagggtggatagcattttaggatgtgggcacagtgggaaggtgggggtgcagccgtattctcgttccatccatgtcggtccttctcttgaaatgttttctgccctctcctcccacctcctctcccaccagttgcttttatgccatgccaagaaaattagtggaaagccattgaagaatttttttttaagtttggattgtggacaaatgtgaatgtggacagaatagtagaatgcacctctgtgtgcccagcacacagtcccgtcagcttcagcagccaccaacccaagccagtcccactcccccctccccaccgccattcctagtattattttgaagcaaattgcagacatcatgcaatctagtttgtaaatgttattgaaggattttaagcagtaaaggggtgtgatcctgggttttagaaagatcatttgagcgtcagctggtggcgggggcagcagggaggcggtggtgtttgtctaggtgggagggggcttctgaacctaggtttggccacaggatggaggagcggggacagaccttggagagatgaaggatgtagattctacaggaccagtggtactggacacttctgctggtgcctctttaatggataatcatggtaattaacatttatggagtactttacgtaaccctaagtaaagcacctctttcttttattatttaaacctcacaaaagccctttgacatttgcatcgttgttaatgtgattttatggatgagaaactgaggcccagagaggtggaggtaagttgcccaaagtcacatctagggagtcaggaatggtgggttttaatcccaaatggcctgcctctggcgttcgcaccacgccgcacaccctctcccgtactgctctcacaggacaggtgtgaattggggaacccgcttaaagaccctcacagctgcatgagtgcctcttgtgtgttcttcttaaaggaacacacctttcagcagagggctggggctccaggttttgttttttgctttctttcccctgtcattgctcaccaaccaccaggaaggtgttggctgctattgtaacatggtcatttctgtggattctgccttggctcttggagggctgttgtaggggccaggagagcatcattgtctccaggggggtagcagctgctgctctatgaagcctccctccctggcttgcctgtgtatattctgaaaggccacatgtcgggagaaatgatgaccaacattggggcctgagacctggcagccccgtggccaagcgatgacggtcacctaaacctctgcttctcagaggcgtccccttactaactgagctgtttttagtgatgggtgttgtccctctttaaactgtaatcccatcctgatgtgtgtaagcattacctcttgctatctcagtgttctgagtgctgaggggcttgttgcagaggtgatcaagggaacctttgaaatgtgaagttatcaccagggttacttaaaagcctctgcttagtgactctgcagacagagcctacacagcactgtctcggtggcacttcaggatgatctgccccacaggtctcagttgaatttattacatggtggctttatggtgcggcattgaggaggatgagtcccgagattccagagcacctggctcatcagggcaagcctgaataacttcctggggccagccgtccccacagcagaaccaaagcaaaatgtgtattggaaggaagaaagaaacaggagagactccaaagatgggagatgcaggaccatgagcctccatgcaggctctggagccagactgaccacctccctcccttccagactgcatgacttgggacattcgagtcacccttctgagcctcagttttccttatctgtaaaatgggggtaaatatacacctcccaggcttgtagtgtctgctaatatgtaaaacacttagagtgctatcagacccatagcaggtgctcattctgttacatcctgtccacatcatggcaggtactggtgactgcccgagaactctttcatccctttgtacctcgtgacaaacctgtacaataggtgacaataacctcatttgacaaataagataccaggaatcagagctgggtgtggtgggtcatgcctataatcgtagcacttcgggaggctgaggcaggaggattccttgagtccaggagttcaagaccagcctgagaaacgtagccatatcctgtctttacaaaaaaaaaaaaaaaataggtgagcatggtggcacatggctgtagtcccagctacttgggaggctgagacaggaggattgcttgaacccaggaggtcgaggctgcatgagctgtgattgcaccactgtactccagcctgggcaacagaataagaccttgtctctggaaaacaaaattaaaaaaatagggtaccaggaatcaaagacgtgtgattctttacacaaggtcatccagcagtgagtagacaggacctggatttgacctccagggcctcatttttctccttgacatggaacatctggaagtcatgtctgccagtctcctggaatgtcttcatgctgggattttcgtttgaagctgttgtcggtgttgccttcacctgaagcagaaaccattttggagaaggcttaccctagctgctggggagctcctagactcttctctgggagtctcctttggccttgcattggccgaggttcttacttactctaggtgccccttcccttactgctagggtccccctgagggggatgtgggagcagccagagcccacatggcttttcccctctgcctgctgatggcagccattcactgtggcgttgacagcgcctttccccggctctgtgtgtgtgtacatgtgtgtgtgtgtgacagtgtcccttacctttgagatgctcccagccctccatccctggctcagcacccttccaggtcctctgctcttcactggtaccttgagatgctagctcagcatcacagtgatggcgtatgctgagagggaggagagaggagtgtggccacaaacacaggctggggaatccgaatcccagttctgctgcttacttcctgtgtggtcttggacaagttgcacaccctttctgtgcctcagttttcttagctacaaaattagggacggtaacaccactcacctcccaggggagttgtagggtacaggtgagtactgctcggagaggaagtggaacattcctcgtgcgcagggagtgccccctgagtctgcccacccctccacactgtcaccatcgcccctctgggaagacagcgcccttagtttacagaacacttccccattcctcagcttgtttaaaagtcttgtggcctcccggtagaggagcagagagcgctgaattaaaagcaggaagcttggtgtgtagttgtggctctgttagggagtaaaataaactgtgtagctttagacaggccacttgccccccgccaagcctacatttcctcaaataggcacagtgtttctcttcctgggttatttatttgttgcctgaaaggccatgtgaccagaacagcatgggctttggagccctaataactgggattcagatttcactgtcactccctggacccaccgtgccaaggtcaaagagagctatggctactagaattccctgaggatttcctgtgactctgtgtctagtgctagatctggacacccattatttcaatgaacatttctagttttcttagttttcaaggctaaatggacactgtaagacaatgtacaggttgagcatcccaaatcccaaaatcccaaattcaaaatattccggaagtcagcatattttgagtgctgacataatgctcaaaggaaatgctcattggagcatttggatttcagattttcagatttgggatgctcatcctgtaagtataatgcaaatactccaaaatccaaaaaattcaaaatccaaaatacttctggtcctgagcattttggataagggatacttgtataggcatctaaaagaatgacaggcgttgatagcattggttttatctcatttttcttttcaactctcttgaattttatccaaatgtgtctgcagtttggctttttttcattattttttatacttgtttttcataattattaatgcaagaaattgcttcagacacagcacttataggtcaatgcttctaaaactatgggaaccagttttcttttttaaaaaactttcaattcattgcagaatgatattttgctaaatcaccaaaaaacagtctagaaaaaccctgaagctcctgtttcacagcaatatgaaattgcttgaaacatttctaaatgcttgcttccagtttctttcctcctctgatgttatactggtagaaaacaggtggcacacccacaccagtttgtgggccaccctgtgcatgtcactgtcatagagtcacttgccgtgtgtgtgtggcacttgctgtgtcattattgaggtagcaacactgcatgtgacagttacagttggccctctgtatctgcgactctgcatctgtgattcaaccaactggggagcaaaaataccgggcggggagaatgcatctgtactgaacgtgtacagacttttttccttctctttattccctaaacaatatggtagaacaattatttacatagcacttacatcatatcaggtactgtaagtaatttagagatgatttagagtatacaggaggaggtgtgtaggttctattgcagatactaaaacatcatttaatagaaggtactggagtgcccatggattttgctatccgtgtggagtcctgggaccaatccgccacccataccgagggatgactgtaccgccatccgctgtgggcaggcagggttcatgccattttcttctggcttgtggctttgttcacatcagcgagagttcagaggtggagaggtgacaagtggaggagcttctgcaacgtccccgttttacaaatgaggaagaggaaaactgtttcctacaagtagggaatggcccaactgccgttcaaagctgagtctgtgaaatgctccttttgtgtttaccagtggctctcaactctgactgatcattacagtcaccgtgggctttaaaaagtacttctttgaggtccttcccctcagtctactgaatcagaatttcaggggccaagacccagaaatccgcatttttcagaagccctcccagtgactagtgatcagcttgggttgggagccacgagtctaaactatgtcacttccctctactctgcagtacaaatgaattgtccttaaccaccaaagggatcatcttcctaccatatcccaagagggagtgcaaagagcacagatagtagggccattaaggtggaggttcaaatccccactctgtcacttccttgtcctgacatttgaggcttataagccaacctccctttgcctcattggtaaggaaagcatgccagccctgcagggggattgtaggaattacatgagctggtgcacctaatgcctataagaggcctgacacttagttggtgctccggagtgtgtgaacgcaaagtggggactgtctaggttcactttttaacaaaacaggtgcaatgccatcatcacagaaagaggcttcaggcccctccccacaaccagagtaaactgggcctgaaaacgggttgtgagttttataaaacgtaacagattctaaggcatcgaagtgaataatcttggagagttttgagtatgtgacccccaaagagcctcagttgctattgaaattttggggggtgtcttgatctaattaatcaagaagcatctaatttgttagctggaggagggtgaagcatgatttacttgaatgtgattagatggagggaacattctgatatgaaaggaaatgccagaggcgtttttgaaaaatttgtaatccttttctgatttggcaggtaattatgataattcctggtatttttacagacttaaaagttttctcacagccacattatttttggagatcatctttcctgatactccagctggaaggaattactccatctcctaaagctctgaaggcatcattttccaaagcccaactcaaatgtcactttcttggtggtgctttcccccatcttttaggccagggctaccaaataggcatcatcttgctgggcaacacactgattggttatgactgcctaggtatcttcttgaggaacagtgattgattagtgctgtctgccaagggaacagcgggcaggggagtagtggcatcctgagatacttacccagtcccctttgataggcattgaggtggatcccagccatttggagttaaacttgtattttgagctcacatgcaagtagagaggcaggatttctgcccagccatgatttgttaaatcgaaggtgagtgatttaaaaaatttgatagacttggaacccacccaaatgtccaacaatgatagactggattaaagaaatgtggcacatatagaccatggaatactatgcagccataaaaaatgatgagttcatgtcctttgtacggacatggatgaagctggaaaccatcattctcagcaaactatggcaaggacaaaaaaccaaacaccgcatgttctcactcataggtgggagttgaacaatgagaacacatggacacaggaaggggaacatcacacaccggggactgttgtgcggtgggggaaggggggagggatagcattaggaggtatacctaatgctaaatgatgagttaatgggtgcagcacaccaacatggcacatgtatacatacgtaacaaacctgcacgttgtgcacacgtaccctaaaacttaaagtataaaaaaaaaaatttgatagatgttgccaaataggcaagttacttaaacttcttgaatcttctaccttctctccagcccaaaagatgaaacccagatgatgactcatagtctttgcacctcgttaactgataagttgtgcaccttgcaagcacaagttcagaaccacaacttctgctggctaggtggtgtccttgggccttttggagaatcaaggcttcattcctggtcctctgtcccttgctgggctgggtttgtggctgtgtcagccctggtctttgtatctccacctggcatttacttttgatttgtcactgtcatagtgttgtcaaatggcatctcctccttaactacctgcagatggattaattttcatgaaatacaacaactgaggatagaaggaagcacatcagactctcaaactgatgatgtcaggacacaagtgcctggtggggatataggcgtgggatataggcgttggatatggcatgggaggctgcctggcatgtcccaaggctcattagataggtgactcccgaatgttaactcttggaggggtgggccttccctgacaccctgtcttctctccgagtcactctagcataatttaccaaatgtcaaaggatgtgaactgtgtggctctcctttctcctccctaagatcctagcactgtgcctggaagatggctagcaactctgtggtgctcttgcttcggggcacactgagtgctccccacagcatttctatctccttggtgtggcacatcatggcctttctccatctggcccctggacacctacttgtctgccacttcctccatgtctcctgtcatgatcacccatgtcataaaaccagctctcatccactgggaacttatcctgccccagatgtgctgccaagcctgctaagtgcggcatctcttgccatcctcacagtggcctggtgaaatgggtgtggtttttaatgcccatttcatagacgcacagccacaggctcataccagaacacacacactgtcagtaactgatcaagcccaggcccatcttgcaccaaggcccgatgcctgaaccacctctctccgcctcctccctgccagcctctggtgccggcatttgcacctgtagtttcctccactggtcatacctttctcttccttgtctccagggtgacctcttattgctcaacatgtttatggagcagagaaggcctgtggggactgagtgagttagtgagaccccaagagggagaagggggattggagagaaaggctggggctgcatcttgaaggagtttgggttttactcttaaagcagtggaagcactgaaagtattaaacagcaggtgacaacattagatgttactttgggaagatcattgtgcctgcttggaggagaatggattggagggcacctgttctctctctgtcctattttctgtgggtgttgaaaaataagaaggtcagatgagaacccataagtgccctcaaagcctaataaaaattccaagaggcagtggttgtgcagcctacttttatttttgtgataacaggaactctttgtgatctcacattctctcttctgaggctctttctgagtcttgaatttatttctagttatactggagtttggaaatagttattcgaggaacagtaagctcagtgtggtttatgtaagatgaaagctgttgataccaatggctgtaggtagggatatgtgatataaaaactcagagtttcagaggttagcttagtaacaatgaacatcatagttttaatggttgctggaaattatttgatcaaattttgtctcttaagttgcatgggatttttccttttcattccctagtgaaatgaaagatttgcctgatgtggtcaagttctgctcttctggctgtggaagagcaccagggttttgacagcttatggtaaacacaacttggatctgggacgtttcggtgtttcctgcatttatggaaaattgcagtaacactctggctcccactgcaaaacaaaacagaaacaaaacacaaaaccctgcttggctttggaaatggcagtggcatttatttaaggctcacattttgtgggggcacattggcaggtatttagcagtaatatcggcagctgtggatttctggtttgctgcgtggtgaatggattcacagcccagaggaagctcgtggggggtttatgtgatttctgtgtggaggaggcacaaaggcattattagcagtactgtgtttgtttgttaaaggcccaaagacgatcgactcaaccttttcttatccaaaaggaataaggtaacaaaggaatattaattttacatctgtacaaagaaaaaagctggcagaaaggctcagtgacttattctgcctttgttaattgcatggttcttgcagtatcttttgtgtcattttcacttactatttcatatttcacactggtttgaaagcgtctgtacctcagggacagaagggggtacctttggaggggaactcacagagcaagttactggaagcctgatatatttcatgttgattgcacagtggctcccttgtatttcagatgaagaattttaattctttataaagggtctaagtggcttctctcactgatgaaggggagctcaaataaaagtagaaagaatgagaaggaaacatacccctttggctatcattcatatcttggcggattctcttctgtgagttacccttcatacaacaacaaaaaaagagggctcccttttattcctcctcagatacgacacacatttagcgacccctgttttttccacagagcttctccctgtatccctcctttactctgacagtgtcttctgtagctcatgtaaagtacttactgcaaatggcctggtattgttttcgcactgcatacagtgtagttagtgcttaggtgagtcctggggcgttggaggggtgatctcttgggaaggttagggagctaggggtctagataaggatctgcctgacctcgcattctggggacttctcttaaagatgcttgcaggattcttccttcagggttcttggagagtgtagcaggattacatctcacatttctctaaaaggcttaagtaaattatagttgaatagtctgtacattgactatagaccatctgtagtcacctccagttttatttattggggatcagctgagaatatcgaataattcaatttggaaaaattcagcagcttacagctggcccaaatgggttgcatgtgggcagagtggagtggcaggaccacagcgcatagccagggctctggtgtcagttccttgttagatgtctgaccttgacagagcgagatcttattaaaaaaaaaaaaaaaaaaaaaaaaaaaaaaaaagagagaggaaaaaaaaagcccaaggtccaaacatgatctgataccatcctatttggaccataacttcatactgttgactctgaagtgtcggtatgaagcaggtcaagacacattgagcttatgggtggattgcatggttcacaggtaagcagtgtcattgactccagccccaacagcctacagatgttttgctgacaggtgtcaggaaggagagtccagagaaggcgggattggtccctggggaatgtctgcctctaagcctcacctttccgtgcttgtgttccaggtggcagagatgcatggcgagctgattgagttcaacgagcgcctgcacagggccctggtagccaaggaagccctcgtgtcccagatgaggcaggagctcatcgatctccggggaccggtgagtgtttccccaaccctgtgtgtctgtcaagcctctgctgcccacagcccagtagaaaagcacagagactcacagagcaagcaaccatgcatccactggccagatttgcccacattcacctctgccacatttgctttttattttttatggggagggggtagaataagtaaaatgttacaagttctgttgaagcaacatttcctgtttctccttctagtcatctatagttaaaattggcatatagtcccctccccccgcaaacccatctttccatactttactacatgggtaaatttccatgagcagtaaacagtcttggttttgtgttgttaacttttacctacatggtattactgttgtatgtatctgtttgccacttgtttttgcttatttgtttttaattgaatattgtggtttgaggagtaatccacgtacatcaggtacagggcttttcaaccacagcactgctgatattttggatcatgtgattctttattgtgagggctgttctgagcattgtgggatgtctagcagcgtccctgggttccacccactagaggccagtagcttcacctcgccaggttttgacaaccacaaatgtctccagatatcgccagatgtcctctgcatttcagaacctggcagaatcacccctggttgagattcgctgatctagatcacctacttgcttggttctgtagttctctgttgaatgaaatagcacaatattttggattcagtagtgtctttgtaaacatttaggatgtctccagtattttgctattacaaaccacaatgccgtgagcatctaacacttgtccttttgtgcagacatataatagcttcctcattttacaacttctttattatgtaaaatgcccacattcaggcaggctgtgtaatgcacgctcatatatcctttgtcagggtgaacaattatccgtcacggccaattgtgtttcaggttatctacatctgcttcctcctcctatatcatttcaatcaaattctgggtattatttcatgtatagacatctttgtatttatctctaaaaatacaaaaaaaaatacaatatccttatcacccccattaccagtaattgctttgtgtcatcacagtcagtgttcaaatttccaattgcctcatacctttgaatagtttttttgattcaggatccatgtgagacccatgcattgtaattggttaatatgtctctatgttgcttttcctttaaattttaaaaattagggtaaaatatacctaacataacttgtaccattttaaccatcgttaagtgtacagttgagtggcattaagtacgttcacacattttgaggccatcgccaccacccctctccagaacttttccatcttccccgactgaagctgtcccctttaaacagtcagtgcctgctccccactccccctagcccttggcgaccattctactttgttcctctatgaatccactactgtcttaggtttcttttcttcaacagagtcttctctcatctctctctctccccttctctctcataatttgtttactgaagacactggatttgccttacagaggttttcaacccctcagctttgctgatggtatctctgtagtgtgattcgatatgcttcttcatttcctgtatttccttaaattagaggcttggattcaggtttaattttgctgattatatgactgtgtcgttgggtggtgttttctgtcaggagatgcctaatgtttgctatctttttgtgatattaacagccatctcttatcacttcctgggtccattacacaaacgtttctttaaggtcagtacctaagtgtgaaattgcggcgttttagtgtatggcgtcttaaactttactgagttttgccattttataaagtaaaagcacctatttattaaccccctgtttgtgtgcaaaagttcctgctgacgcttttacatccctgctgtgatattttatatatttgtgttttcatccgctgttcctggcccataattcccgtagcccttgttgtaatgttggaggcactttaggcctcagaagaagggcagatcacttgagatcaggagttcgagaccagcctggtcaaaatggtgaaaccccgtctctactaaaaatacaaaaattagccaggcatgtggtgggcgcctgtaatcccagctactcaggaggctgaggcatgagaattgcttgaacccaggtcagaatctctctgaccttctcctgctctcttttcacctcttcctttttctacccaaggcaggactctaatcttcccctgctatccataaagaaattgacccctattgtctgattgtaggtcacaagacccccatttcagaaggggtccagccccgcaccctggaggaaagaatactgcacagagaagccaggaagcatctggacagacaggccttgcagggtctccccactcagtctgttcgtcttagaccataccctttttatccaatcacgttgttaatcttgattatccagtgatgtctccataaaaggcccaggaagacaggattcagggagcttccaggtagctgaataagtggagattcctggaggttgatacatggggagagcatggaagctccgcaccgcttcccataccttggcctgtgcatgtcttcactgtatcctttgtaatatcctttataatcaccagaaaatgtgtttctctgagttctgtgagctgctctagcaaattaatggaacccaagaagggggttgtgagatccgcattttattgctagtgagtcagaagtacaggtaaaataacctggggcttgtggttggcatcagaagtgaggggcggtcttgtgggactgagcctcaccctgtgggatctgatgctgtctccaggtagatgtgtcagaattgaatcagaggacacccagctggtgtccgctgcagaactgattgtttggtggtagggagaaacccccacacattttgtcccaagaagtcgtctttgttgatggttgtggtatgacagcagaaggaaaatggttcatgttttcccacttgtacctaccaatacctttttgcatgagatgggtttaacttgcatttccctgaccacagatgaggttgcctatcttttcatttgcctgttccccattctgggtttcacatatgacttctcacagcctttgtccatttttctactgcacagtatttggttttcttgctttctcactgtttttatatctccttttcagttacatgtattttacatatctgctcctagtctttggcttaatcattcactttaaaagtagaaaatttaaaacatacgtaaaagcagagggaatgatgtaacaaaaacccatgtccctatcactcggcctcagtaataatcaactcaaggtcattcttgctttgctcatactctactcattacttctcaactcacattatttggatgtatatccaatccatcttatgctttcattcataaatacccaatatttactgctaaaatatattcacaataccattatcacacctatttttattttatttatttatttttttgagactgaatcatgctgtatcgcccaggctggagtgcagtggtgcgatctcagctcaatgcaacctccgcctcctgggttcaagcaattctcatgcctcagcctcctgagtagctgggattacaggcgcccaccattatgcctggctaatttttgtatttttagtagagacggggtttctccattttggccaggctggtctcgaactcctgatctcgagtgatctgcccgcctcggcctcccagagtgctgggattactggcgtgagccaccgcacctggcctaacacctattgttaacagtaatttcatgatatcatgaaatacccagtcagtgttcaatattctccagttagctcaaaagagttttccatgtctttgtgttgatcaggaccctgataaagttcatatagtgcagttggttggtgtgcctcttcaggctctgttaatttgtagattcccttgctgtcactctcttttttcccttgtcttttttgtcattattgtggaagacacttggctccttgaactgtaggttttcccagttaggattttgctaattgcaatcctatggtgatgtttgtcatgttcctctgtcccttaccttgcctttaaattggtcattcactctggaggcttgatgagtttcaggtttggttttttgccccaacgatgtcacaggtggtggtgtgtgtttccatcaggaggctcataaatgttggtctaggaaagcactattggaggtgcgagttcacaccagaccccatttgtttcagtggggccagtatacaaatgtaatccccatccccccaccccctaccgtattgaaagcctaatagtgcagtccctgactgagtttgcttccctaattcctgacagctccaagactttgtacatgtttttgtggatttctttaagtaggtagttaggagtttccttaagaggaagcatatttaggaaggacctgttgtatactaagaaccctttcagggaggtgatatcatctccattttacaggtttactgaggttcagagaagcctccagtcattctgtgagtgtgtatgtaatagagcctggattcagactccggtttaattacaaagcccattttctttctccaagctacaccagctctagagaattgcaggaacgggtatgggagagggggtccccttacggtacccatttccaccagccaaggttccagcatccctgcagtggccctgccacccgtgttgcacattagagacttgggcagcatctaatctacctcctctgagaaaggacaatgggatgtggggatggaggcctggctgtgacctgtctcccagtgtgagtggggtaggtcttgaaggtgggccagcctctctgttgtccctgcccaacaccaggggtcccagcctactccaaggctagccttgcaagagaggggctcagtgggcagtcaggaaccaggcagtggtcccatttcttaggacaggttcagtgtcaggtggtaaatggtaggtgactgttgtcactgtagataaatttttggagagcaacgtcagtgcatcattctcattgtggataataaaacccgattaacctgtacaaatgaataactgctgatattaatagctaatatttattaattgatatcagtcaaaaatttggcttccctcttgtatattagtaattcatttaatcctcacgtggcctaatagtaattaatattatgatggccattttgcagaagacaaagctgagactcagaaatgatgcaactctcccagcatcccacactgagaagtggcacttctggatctgacttaaaaaattaaatttttggttttttaaatttatttttttcttaaactttttttcatattatacaatatgatatactaatggtaatatttttgcttttaacagttgggaagtatcaaaatttttagactcatgacaaaccttagcatccccatgctaagaagttaagtagtaaaaaagggtgaaataaatttcttcctttctcttaccccctgattttcctacctggaatctgtaactgttaccagtcttgggtttctctttctaggtatgagtgatgcctcagtacaccgctttattgcgcctatacatgttaataacgagcacatgcctatacatgttaataacgagcacatgcctatacatgttaataacgagtagcctgctgaattccttgttctgtgtcctacctttcctcatttaacagtgtgctttagagatcttctaattttacttcacgagtagaattgttgttcattttaagaaccgtgtcttgttcccttgaactgacaaaaccgtaatggatttccccaggtccctgttggatgttgcatagtttcccgtttttgtttttacagtaatgttgggatagcatcctgggtggaaatcctcagtgtagatgaaatcctccctttagcctggaaggctggctggcagtccacagggctcagttagactgggtgaaaacccagagatcttgccctgcaggactcttggggctttggaaagggtgaccacctcctcccagcctcctccacctgctgcaggaatatcccttttgaggctcaaaatcctttcagaggtcacgatgtagttccaacaacgcgttgggcatccaaattaagtattttccctttttatgaatttgacaactgagttgcagaaggattttggctgctgcactccccccccacccccccccccaccagtttctcctcatgctcccccagggtgctggacctcctgccctgtgctgccccccacccagggcctttgttcctagtgttccctcgcctggaacactgcccagtgccagggctgcatatcagctcaacgcttcctcaggaatcctccctgaagccctgacaaggtcacactttccaagttgactatgatgctgacatgtgtctctcccttcctgtcttaatgtcatgttacattgatttatcactgatcagtgttatctttcccgcgtccacaagggcaagtttttgtttctttctgctccctttgggtttcagtgattcacatggtaggtgttcagtaaatgtgggtcaactcattgagtgaatgaatgaatgtcaccagtgggcccccatgccatgccagcccatctctcctctgtgccatgctccctctgcccaagtctgatgccctgcaggacagagacagccatttacacagaggcagctctcatcatcagatcctttcctctggcaggctgtgatggccagaagggaggagcaagtaaaacggtcactaagggcctgaaggctgtcagaagagcttgccatttggaccgggtccccaggggataccccattattgcctcaggcctgctttggtcgtcatctcagagtcagacagccagggcagaagaaagaaggccgtttccagctcagttttcctcctggagtcgtcttttgtttttttctctggcttttcactgtaagaggcatctatttatgggaatctcagccacttccctcttcctttccatggggcctggatccctgaccacactggattaggcttcctcccagacaccagggtgttcgagtgactcagggtcaggactgtctactttaggtggaaacccaaatctcctcttctatctgctgggaataaacatagtgctgaccatagtgcgaggttctgtgagattctgccagtgaaacagtgctctctgtgctggccctcatgtcccatttccgactccgatcccctgtgcctagcaccattcccagcatgtagtaggtgctcagtaaatgtttgctacatgatgacttcattttcatagggcagaggctgagtgcatagaccaaatgataattcggaaaaaagagatgagcagggttagtttcctttcagtggtatctttttataatgcaggttgagtagctcttttctgaaatacttgggaccacaagtgtttcagatttctttacattttggaatatttgcattatacttgtgggttgagcatccctaatccaaaaatctgaaatctgaggtactccaaaatccaaaattttttgggtgccaacaggatgctcaaatgagattggaacattttggatttcagattttaggattaggaatgcttaacttgtatcactatatatactttacttttttttagagacagggtcttgctgtgttgcccaggctggagtgcagtggcaccatcatagctcggtgtaacctcaaactcctagacttaagcaatcctcctgcctcagtctctggagtagctaggactacaggtgtgcgccaccaagcctggcttgtttgttatgttatgttatgttatgttatgttatgttatgttatgttatgttatgttatttttgtagaggcaggctctcactatattgcccagactggttttgaacacctggcatcaagcgatcctcctgctttggcctcccaaattgctgggattataggtgtgagccaccaaacttggcctgtgtatccttttaagctaagacacttttaaggaacaggagtttgggattaaggattgaatttttctctcttcttctttttttttttttttactgtgagtatttttaggactcttattatgtttttcccctttggtataagatgtgaatgaatgctggagatttttaccttttagcgggatttgattacactctgggagaagagctcccggtttgagtaagaaatggagacagggaaatagaaccttgtaagactgcaagttatagaggtcaattaaagacacagcgcggtgaaagctaaaggtgaagccactcattaaatgcagtttgttcccatggtggatgcaaacacgagctcacttcatataatggacattggattcctctttattttggtcccactggcaaggctctgtttctctgtcccgtttctgatcacctccacttaagcagaaaagatggcctggcttggtaagacttgctgcctgtggaaccactgccctgactccaagcatccatgctgtcggctccttccccaccacctccgctctctcacttgtcccttcccttgtctgtttgatgagggaaccaccctttggcagagctttgctgtgtgtttggtgtgcatttttttccttgcaccctctaggcagtccttataattttcttattaggcccatttttcagctgagcaaattgaggtacagagaggttttgtgactcacccaaaggcacacagcttcatggtagcacctgaatgtaaacccaggactcttttgttccataccaccacactgctcactctttattttatgttttccaatttcaagcaaaatatggtgtctgttgtgctccaggcacagcactctggatggttttaaacattcagatacttctgtggtgaagctcttaaacatgcccattcttcatctgcgaagtgaatctctccctttcttatctctccttctcacttcatacatcaggatttgtgtgtgtgtgtgtgtgtgtgtgtgtgtgtgtgtgtgtttagcatactcatcacatggtgtttatgtcaggctcttcggaggccgggcgtggtggctcatgcctgtaatctcagcactttgggaggccgaggcaggaggatcacttgaggtcaggagttcgagaccggcctggccaacatggtgaaaccccatctctactcaaaatacaaaaattagccatgcatggtggtgcgtgcctgtaatcacggctgcttgggaggctgaggcaggagaatcgcttgaacccgggtggcggaggttgcaattgagccgagatcacgcaactacactccagcctgggtgacagagcaagactccatctccaaaaaaaaaaaaggctctttggaaacttgtaatctagagaaggcagagttgcccaaaagcagaacagtgggccgggcgcggtggctcacgcctgtaatcccagcactttgggaggccgaggcaggcggatcatgaggtcaggagatcgagaccatcctggctaacatggtgaaaccccgtctctactaaaaatacaaaaaattagccatgcgtggtggcgggcgcttgtagtcccagctactcgggaggctgaggcaggacaatggcatgaacccgggaggtggaggttgcagtgagcagagatcgtgccactgcactccagcctgggcgtcagagtgagactcttgtctcaaaaaaaaaaaaaaaaaaaaaaaaaaaatcagaacaatgattgagtggggggtttgcatagttgcttcatatatttttaaaaaaggacctggggttctgtgatgcagtaagcctgaaaactgttggattagagatagtttgatagtcttccttactgtgggatttccctcaagggtcacacacgggggtgctccgtgcttctccaaagggatgggctaggtacagcagcatttcccaaaattatttccccaaggaacactattgcagtcattatgttccagaattatttccctgaggaacatcttctctaagaagatggtcatggagctattttccgacgagtgcatctgggaaaggtagggccattaaatgtcatgtttttttattgatgtactagctagcagggagctcatcagagcctgccttatctcatgagcctgccctggcatggagtctgcagggcccggaggagaggaagtgacatagcgtggctgtggggtgcagtgggcctgcctgtgtttagtcccaggtccaactggcctcccacccactcaccagcctggtcagagtttggtctagaacagcactgcctttcccaggaactttgggcctctgccacctgggctgtctcttatattctgcattttctcccactctctccatttctcctcctgttttcgtgtctttgtttcttctttggtctctgtgtgcttctctttttgtttttcttttgtgtctttctctccctctctctccttttgtttctctctctgctcctttctttgtctctgcctctgtctctctctctctctttcttttcctctgtctgtctcttccccctgcctgactctctctctctgtggttgcaatcctctccctctcccttcccttccactctcccattgtctccagtttaataaagatttacattgctgtatgttaccatgataattgccattcattacaattgccctgaaaaactacaaagcctttccatctccccttcatcatccaagccttgtgtgttttgtgagggtccctgtggagtgggccattgcctgccttccagcatatggctgacccctgatgagtgtttctggagcactttgtgctgtgttgtttgccactctgcagtaccacttggcgttgacttccattttcccctgtggacctggagcttccctgagacagagactgttgtcttcattttcctaccctcagagcctggaacacgtaatcactcagggagcatatgacgtatacatctgagtgtacacctggagtatctctggcaacactctgttcactagcacgttcgattatccagaaagctgccttcctgtcttgctcaataacacctcatgtgggtcctcgctgtgagccgtctgtgttacctggggcaccttgcttcctctgagatgactgagctgatgggagagaaagatgagtaatttcatatccagggatgagatagatggaaaaaccccatcccaagttttgtaataagattcactatacaataaaatgctccctgggactttcttggtttctttaaaaccttcggagggagtgatctcatttgagggctgatgcgatttaagtatgaaagcttaataagaaatctatttttctgccgggtggcacttgccgcatagctaatgatcaagtaccaaactgtctcctgtcccacggcaatgttaaacttcgtgttccaaattataagaggctttttaactcagcgcttggacatccctgttttaatcatctgccgtcttgaaggagattatttttaaaagtgccatttaagaggggctactaaaaatatatctcacatagaggcttaactcagaaatattagcctttgacacaaaattatttggaaagatgcttgtggaacccactttaaacctctagatcgagagaagaaaagcatctctttgggcctagctgtgttttcctgaccatggccaaataccccaagtgatcacatgctccttgctgttcatgcaggtgcttcttgcacctggggggagttggaagtattaatatcacagagctttcttttctgatgcacttgtgtgaaactcatcttttacatggcttgctcatcaccatgggtggtcagtttcccctggggacccatgaggggctggactctagggtttgagtggaggagtttggttgtccaaggcatccagctgtggaactttacacttccctgaagatcaaagtttcgtgtcagctggcaaatgcagtgtatgcaagcttatctttaaagctggtcctatgttgatgcaaatagaaagcattggcaaggtgcaaaataatcaagatttagaaacttggtactctataatgacttcagctgtgagtcaagagaggcattttccacactggcttacatcgcctgtcggtcactgtgttttgtgtggccactttacccaatgtgaggaagactacggagatgtagcagacgtggaaaatacagtccctgcctttgagaaggtcaaagcccagaatatattttgtgtgacttgtgtctctctggcttcacttcatggttatttggcatggagacagaggtcctgcttggataatgctgagatctttcctgccactgatcctgaaggaatagaagctgggattggaaggcagctttttacccctccgttctacctgtcctgtcttctcttctccagcatatgtttgtgaatgcatggtttgagtttgccgctcacaacgtcacctgcaggagaagtgacaggcagcggccaccaggattctcctggggctcacgtgccccttgttctcattttagttaccacccattccttcttgaaatggcctctctgttctttgaatttcatctgaaccgggtgcacagatatggattcatcaaaatcctgagctcatgacccacattcattattggtgcaggaaggcctgctctgattgaataagtaagcttcctctgatctcattcttggtctcttatagaaactgcccccagactccactcacctctcccacagggagtaatctcaagaccctggttctttgctcctgcctggtatgcatgttattagcatgttcatatctttttttttttttgagacggagttttgctctgtcactcagactggagtgcagtggctcgatctcggctcactacaacctccgcctcctaggttcaagcaattctcctgccttagcctcccgagtagctgggattacaggtgtgtgccaccgtgcccagctaatttttgtatttttagtaaagatggggtttcaccatgttggccaggctggtcttgaactcctggcctcaagtgatcgacccaccttggcctcccaaagtgctgggattacaggcgtgagccaccgtgcccggccgcatgttcatatcttaatatgatgtcatgagcatgggaaaggggttcctgtgcctggggcaaccgcgtgggactcctctagaagctggtctgggccaggtcctctcctgtacatggtcaggtgatgacactgtccttgaccatttcatttctgtcatcctaaaaatgtggaccctcccagtgctttccattctgtctcagtgccaccttgtaaatctcactggctatgacgcatccctctagatactaagttaatttgttcaatttctgctaaattaacacacacagtatttccagggatacataataaccacatgattatgttaatagttgtacaagtcttctaactaaatacattatacttattccttaatttaatatatttatttccctgcattgagggttcacttcttgttagtcacaccttccgcacaagttgcatctgatgttctatgtattttttgaacgatttcttcttatttgaaaaaatctttctttgaggccaggcacagtggctgatgcctgtaatcccagcactttgggaggctgaggtgggctgatcacctgaggtcaggcaggagtttgagaccagcctggccaacgtggtgaaaccctgtctctactaaaaatacgaaaaagtaactgggcgtggtagcatgtgcccttaatcccagctactcgggaggctgaagcagaagaatcgcttaaatccgggaggtggagactgcagtgagccaagatggtgccattgcactctagcctgagagacagagcaagactccatctcagaaacaaaacaaaacaaaaacaaaaacaaaaaacaatcaacaacaaaaataaaggtggctgggtgcggtggctcacacctgtaatcccagcatttgggaggccaaggcgagcggatcacctgaggtcaggagttcgagaccagcctggccaacgtggtgaaaacccatctctactaaaaatacaaaaattagctgggtttgatggcaagtgcctgtaatcccagctacttgggagggtgaggcaggataattgcttgaacctgggaggtggaggttgcagcaagtggagattgtgccattatacttcagcctgggtgacagagcgaaactccgtctcaaaacaaataaatgaaggtacatctctgcttccttgtctcttgggccatcagtcacgtaggcactttgggcgaggcactgagcagcaccaagggcatcttccggcgtgttctgggaggcttccccatctccctgaaatgagtttatataatctcctagtaaaagtcaatgctgtttcgctgtgtgtttcatggagtttggttccctggccagctggtctgtgggaaccagagcagtttgtgcctagattcattgctgtctcttttctgggcgaccagcacgttatgtgattagatgggaatagatatgttttggtaaagggatccctgatttagttgcaaaaagccaagccattggctccctttgacctgttcttctggaaataacctcttcttgaggggtgggcaccaccttggtattacctacaccccagtgttcttgggccacagctttcttgcccatgaggtctgcagagctgccgtcctggtttctgaggaaggtgattttgttgatcagagttcagatggtgttctcccagatattcgaaaatggagggccttgtccatctcaaagcggtggttggggatgcaactgatgttgccagccaggcgttggggatcagccaaggcttttgataaagttggaagaacttcaagctcctttggaccaaccttccttccttccttcctttctttctctcttccctcctccctccctcccttccttccctctttccttcctttcctctttcctaaatagagacagggtctttctctgtccctcaggctggagggcagtggtgtacttatagctcactgcagcctcaaactcctgggctcagcgatccttgcacttcaggctccggagaagctggcactataggtgcataccaccatgcctggctaattttgttatttttaaaatttttttgtagagacagggtctttctatgttgcccatactggtctcgaacttctgggctcaagcaatcctgcctcagcctcccaaagtgctgggattataggcgtgagccactgcacccagccagatttttatttctgttcggggagagtggcttcctttcgtttctcctgtccagggtgtcattgcctatgccagcctgagtgtgtgggcctcctgtgggaatcgccacactgtcctgttagagcaaagcttgcagccaactcttgcccccagtgctgcaatgcaacgcagatattttttagctttgttttaaaaataatatggcagatggcgaagcaggacctgactctcgccttcgccctatgtcttttcgtctgctctttctccaccgagtcctgtccctcagcatttgctcctcctgttccttctacttccatcgctctgcattttcaccatttgtcttttagaagacatggtttaacattttttctaagttatataaataatataaaaatacatttctgaaagaatataaataatgcacaactatctagagtacaaaagacaagtgttccctcctagcgatcctgctgtgaagcgtttggtatatacccttccaggtattttttatgcatttgcatataggcaggcatatatatacacacacacatgcctaacgcacatctatttttaacacaaatgggataatttatactgttcagattgttttgagactttgcattcttcagtcatgaatatatgtcgacttcctcctctttcacactcttccaaatcttccccatccttcaaggtgtcattcattctttgagaaagcccctagtggcgctgtcaatagtgagttttggtaggtacgtttctaatgttctttaaattcctgtaatcctcttcccctctggaccgctcactttgtctaatcttatgttgttctttgtttattcattagttaattaattccgttgagctacactcagttatttggcccccaagaagtttgtcgtcggtggaagacacagacatactaaacataccttgccctggaggttcatgagggggtggtagatggcaggctgttgatgcacagtagttgaatgaaagaatgagcaatgagtaagaaatagaattctgtaggtatcaagtataatgatggcacaatggtggggttagttacctgctggggtatgtcatggaaggtttcaaagaggagacgtttgacttgagtttttaaggatgagttgaagttgatcaggaagatgggcctgttaggcagcgggaatggtggtatcaatcgacatggtttgctcacaatattctcattgctagtttcatggatgtatcctgtggcttctccatgagataatgaagttcttgaaagtgggagtgtcatttacactcctacctgcagacaggtatactggcacttattacataccaaatcctattccatgagctgtgcatgtagtagcaagcactgatgtaggttctcatgtctccattttagagatgacaagactaaggcacagataaggtaggcaatatccccaagtctccatgtccccatgattagtaggagatggagctgtaagtctctttttagagtcttcatgtcctcacctttatttctttacattttgtatttttaatttttttaagagacagtctcgctgtgttgcccagactggagtgcagtggtgcagtcatagctcgctgcagcctccgacttgtgggctcaagcagtcctcccacctcagcctcctgagtagctgggattacaggcatgcaccaccacacttggctaactcaaatttttatagagatggggtttcactatatggcccaggctggtctcaaactcctgggctcaagtgatcctcctgcctcggcctcccatagtgctgggattacaagtatatgagctgctatgcctggcccatatcctcatctttaaatgggtctaggaatgcccaccaaagagagttgtatgaggttttaaacagtaaatgcctctaaatcatccaaagtagggaataaaatatcagcttatatcataaacttggttaaaatagcactctcctgctttatttttcctcataatactaatgctacttggcatagagttgtttatttgctctctcctttgtccattttatgtatggctgtgtccccagcacctgatacagagtataaagcattggctgaatgcgtgaatcttagttcccgcttttcaccttagcatcctgactaccgatgccctgaacacacatggtgaatttggctgaaatgaagcattctgtgcctgccccacaaaccaccaagggactgtgggtttatttgtctcaagatggtcaacactgctgttttcacattttacttgctgtcaaatataaagagatatcatatgttgcccgcctctggttttcctgatgtctcaatttaagtggtttccaatttgggtatgaaattatccatcagtcacagagagaactggtgccttcagcagtggctgttggaataagccagggcttaactggggaagctaatggtggaggagcaagggctggctagcagaggtttggccctgctcctccaggtcccctctggaataccacttctccccactggatggtgggctgtgtctagcccattccccaagatccagtttggatgacacttcacctatttattcattggatgctaatagtgtcttccctacgccagggactgacctaggcatcagggatgcagagagcaggccttggtcactgtcccctggactcacacagtctgcagcctggtggaggagacaccatgtgagctgagctataatgactgaatccagtccctcaccagatgcagtaacctacaagtgtctgttgctcagaatgtctttattttgatcagtcacttccacagaggactgcccaaagagacgcctctgtccagctctcgggtctgtctgtgtggagtacgaggcgtgtagccctggtgatcgtagagtgatgttagatgtctcagggtcaggtgttgaataatatgggctctgcttgggaaggtgttccccttttccttttggccatgctggtgaggtctgaggttgatgctagcccggctttaactcttggagaccctgacaaagtgagtgtgggcctctgggtcatggtgccgtcggccactgggaagttccgagctctcagatgcggctgcagtagactccgctcagaaagtccagacgccttgaggccaaggctcacccccagatcagctgcaggagaatctcttcaatgggacctgggcacctctcactgttttgcatgattctgatgctcctgaggttgagaaccactaacacttaggatttaatgacatttggctttcatcagatccagttgccttctagtgatactggctttctgtttgctagagtgatacatactttcctttttaagtaaatgttataagtgaaaaaagatgaatggtgtaatcccaccccagggtcacttgagcccaggagctccagactagcctgggcaacatagtgagaccctgtcttaaaaaaaaatgcatggattgaaaaggcaacgttattcagcaacagtgcaagtgggaggcgagtgtagcaagaatcctggtggtgctttgtgatgcaccggggtttggggaacactcctctagattttatccatggattgcagttttagcccccattattttggcgcccatagactcattgggaatgatttgacattatgccaatgactcattaagtgcaaacagcagaaatagctaaatgaaacaatttagaaatagctaaaaggtacaatttagtgattgtatctttctctgtgtaacaaattgtcccaacactgagaggaaaaaggacatttggcagtgacagcatttaccatctcacagtttctgtgggcctggagtcctcgtgccactcagctggttctctctccagggtctctcccaggctgcaaccacagcctcagccggtgactgcagacacctcagggctctcctagggaaggatctgcgtccaagctaacccgtgtggttgttggcaggattcagtttcttacggactcttggactgagggcctcagttactctccagctgttgactggaggccaccctcggtttcttgcctatccaggcctcttcactgcggccaaagaaagcaaaagagagagaccaactaaatgggaatcagggtgttttgtagtctaagctttagaggtagcattctggccgggagcagtggctcacgcctgtaattctagcattttgggaggctaaggtgggggtgcatttgaggtcaggagttcgagaccagcctggccaacatggtgaagccccatctctactaaaaacacaaaaattagccaggcggtagttacacacgcctgtgatcccagctactcaggaggctgaggcaggagaatcacttgagcccgggaggcggaggttgcagtgagccaagatcgacccactacattccagtctgggtgacagagcgagactccgtctcaaaaaaaaaaaaaaaaaaaaagtggcattccatgatttctactatattctactctaatctgttcattaggacagaggcaagtcactagggccaagccacactcaggggattacccaggaggtgaggaccaggaaccggagccacggggtctgttttagaaggctgcacaccacaggaatatcactgaagacagcccccacgccacgtccctggcacctttactggccccccgggagcgagttgtcacaggctgaatgccaggtgaagccgagcaatcgctagttattttatggacgaagtgagtcttacaaccgtgtttgcactgtactttggtcacaaatcatctgagccaaaattactgcttccctgtaattgattatgtaggaatgattgattggtcgtattgaaaatctgtggcaggggccaggcatggtggctcatacctgtaatctcaacactttgggaggccgaggcaggtggatcatttgaggtcaggagtttgagactagtctggccaacatggagaaaccccatctctactaaaaatacaaaaattagctgggcatggcggctggcacctataatcccagctactcaggaggcggaggcagggagaattgcttgaacctgggaggcagaggttgcagtgagccgagatcgcaccactgcactccagcctgggcaacaaaccaagactctgtctcaaaaaaaaaaaaaaaaaaaaaagaacaattctatggcaggagtttctgcagactgactcaccctggcctcttcttcaataacgtactttgtttcccttctctttcctctgtctctttgccccgttctatcctacattgtatattgtctcacatgtctgtaatttcatgtcttgagggttggtttggggaacttggtttctgtgaattttactctgtcttggctgttggtttctgaggtccagaggtttttctggttctggggttttctaaccaggagaatgtgggcaaggcttccattgaaagccccaaatcagctggggtgaagacggggatcaaggacctgggaaagaatggccagactttctgtgttctccaggcctatacaagcctttctgctgcagtaactatgtggtttcaggcaaggagctttacgtctctgagcctcagttttcacagctgtaaaacagggtgtagtatattagtcaacgtaggttcagttgcactgcagtaagaatcccgtaatgtcctgaacagaaaacacatagatttctgtctctttcatgtcacttgtccttcgtgaagttggctgggccactgctctgtgttgtcaccatcctcacctgcagacccaggttgtggcagaggggcaggagacattggccaagcacattctgactcttaaagcttccacccagaaattacatgtcacatctctcttatttcaatggtaaagcaagttccacagacacatctaactgcaggtgggtggggaggggcagtctcccaggctcctggaaagagagagcatagttacttgtgagcggtcttgatcactcaacgggtaggttatgaggcttcaggcaggtaatagatgcagagatgtgtgcgcccggtacgtagtaggcaatcaacagatagtagtgctgatggtggttacggtggtgatgggaatgatgctgattagagaactaaagcttatctcgggcctgcagtttacaaaacctttgtcttcctgagccactcatttagcccatgtgtgttgagtttttcagtttcctgagttgtaggtaccgtgctttgaactcaggatcaaagagaagactgccatggtctgtggccttaaatagtccacaatctctccttggcaacagggattgagggttttcctttgggttttcattttcaggccttggcatggttaggaaatcttacaaataaaataaatgctggagctggatgaggcctttgggatcatggtttttgtattaggatgattccagtggaagaaacagagaagccagtacaaactggcctctgcaaaacaaggaattttttatattagatactaagaaagtccagaggtaggtgagtgcctcattgtgttttgtgttgctgcaaaggaatgcctgacactgggtaatttatgaggaaaagttttatttggctcacgattctgatgactggaaagttcaagattgggtatctgcatctggtgagggtgtttccactcgtggcagcagaaggcagaggggagctggtatgtgcagagatcacatcgataagagtgaaagcaagagagtggggaggtgccaggttctttaaaacaaccagctcttggagaaataaatagaggccaggtgcggtggctcatgcctgtaatcccagcgctttaggaggctgaggcaggcggattacctgaggtcaggagttcaagaccagcctagccaatatggtgaaccttgtttctactaaaaatacaaaaattagccgggtgtggtgatgtgtgcctgtagtcccagctactcaagagggtgagtcaggagaatcatttgaacctgagaggtggaggttgcagtgagccgagagggctcggtccccagcacccaaacacctctcatgtggccccacttccaacattgggggatgaatttcaacatgaggtttggagggagcaggcatgccaaccatagcagcaagtgtcagcttcacggtgacccagagacctgggatatcatggaaacctggtacatttctgcctgactccgttctcactgctcccttccgctcccccagcccagtccgtctcccctcatggaaacagcagtcgctgcagtgttctcaggctgtttagactcaagagaaagagcaagtctctgcccagggttgccagcagaaacccccagattcactctgaaccatgttagttaattgacccatcctgaaccagttactacggccagaaggacaagatatgctgattgactgaagtcagttagtgctcacccttggatcacatctcttggaaggatggtttcccaacaggagagtggaggtgggggcagcagacagccatactccactcctgtttcctgccccttcttttcttccttttcttaaaaaaatagataatgaacttatttatttttgagacaaggtcttgctctttttctcaagcaggggtgtagtggtgagtccctgcagcctcaccctcctggggtaaaattatcctcccacttcaggctcctaaatagctgtgaccatgcctggctaattaaaaatttttttgtagagttgggggtctccgtatgttgcccaggttgatctttaactcctgggcttaagcgatctacctgccttggcctcctaaaagtattgggattacaggcgtgagccactattcccagccattttcctttctttagggaagaaattgaagctcagagcagggaaatgacttggctgctgccactcagcttgttagaagcagggcaggccatgggtccaggactgtgccctttagccactttgactcagttccaaaaacatcttctcaaagagtcatcagtttcaaaagggtattggggaagcagtgataaagggaggtgattataaaagggatgttaattgcactatgcctggcattttcaatgagcagaactttgttgtttattgcttattgacagaagagatgagaaatgaggctgatttctctctggcagggctgctgcttgggtttgatcactgtgagcaacaggtcagggctctaattgagggttttggtgattggcttcctaagtcatcgatcccggtgagtggggcctgcccagcagtgatgagactgttgtttagctgctgatgggaggcactggtgtgtgtgtttgggggcatgtgttaacttttccatatgaatatttctggaaggtacttttttggaattactgctaggcttcagtattgaatgtcacagagcaagttgtccaggaggcagattctggtatatgacctcttggtgtttgaagacagaactcctaagaattccctcttactttctgctgccaatgccctaatttcttaaccttgcagaatggaattatctggaagctgcaccagcacatgagaccccaggaagagtccttagctgacctaagggctgatcagaatgaccttggtctcggttccaggggttcagaaatgtaactggatcaggagggtacaggcttagacaatctgaggttgaggaaggccacttacctgtccagactgttctcatctaccccccaacacccaaccacccacctatcatccacccacccataccccccacccacccatcccttcacctgtcatccctccacttatccacccacccacccacccctcatccatccacccacccacccacccctcatccatccacctagctacctaccacccaccatccatccacccaccatccatccacccacccaccatccatccacctatccacctacccacccctcatccatccacctgtccacctaccacccaccatccatccatccacccaccatccatccatccacccacccaccatccatccacccatccaccatccatccatccacccacccaccatccatccatccacccaccatccatccacccacccaccatccatccatccaccatccacccatccacccaccaaccatcaattccatccacccgccatccatccatccatccacccaccatccatccacccacccaccatccatccatccacccatccacccacacaccatccatccatccacccgccatccatccacccacccacccacccaccatctatccatccacccaccatctatccatccacccaccatccatccacctacccaccatccatccatccacccaccatccatccatccaccatccatccatccacccatccatcaatttcatccacccaccatccatccatccacccacccaccatccatccacccacccaccatccacccacccaccatccatccacccacctaccatccatctacccacctaccatccatccacccacccaccatccatccacccacccacccaccatccatccacccacccacccacccaccatccatccatccacccaccatccatccatccacccacccaccatccacccaccgacccacctaccatccacccacccacccacccctcatccatctacctatccacctaccacccaccatccatccacgcatctgcccaccacccatccacccacccattatccatctacccacccacccatcgttcatctcaccaaccaacccatcatccagccacccacccaccgacccatcatccacccacccactcatcatccatccactcacccacccatcatccacccacccacccatccatcattcatctacccacccatcatccatccacctatccacctagccacccacccactcatccacccacccacccatcattcatccaccaaccccccatcatccatccacctatccacccagccacccacccatcatccacccacccactcactcatccatccacccatccatcatccatccacccacccacccatcattcatccacctatccacccacccacccaccccacccatcatctatcatccatccccccaccacccacccacccatcgtccatccacctatccacccagcaacccaccccacccatcatccatccatgcacccatcatccagccacccacccacccatcatctaccatctgtcatccatccacccacccatcatccatccactcacccattatccatccactcacccactcacccatcatgcatcctcccattcacccccactcccgtcatccatctacccaccccacccacacatccggcatttctaagagctcatagagtagtggatacagttgtgcaaatgaatttagaaaatgatttgtacctaaagtcatcacgttcatcatgaggaatatgtcttcaagcagcttccaaaacccagccatctgaaatgaccacccctgccaatgaataacacccgggttccacatcaagggaggcagcaaccctatttgacccctacctctcattcattcaggaggtatttgccgagcgccatgaggacctgcgatagacgacaccaaactcaattttcattactccaccagcagggaagtcgtatttccctgttttctaactgagaaaagcgaaggttagagaggtcaggtgcttttgttaagatagcagagtcatggtgtgaaccttgctccgtcggaccccacagccatggtcttgtaagttgagttataacctagtgcgtggactctggagcccacactgcctgcttccagtcctcactgtgccacttagagccctgtgcccttgagcaagttaagtcaactctctgagtctatttccccatcagtaaaatgagaatgatcatgatatctactccttaggaggatgatgtatagaaaaatgcgtaacgcagggcctggtgctgagcatgcggttacctgatgttagctgccagtgttagtttcttagagctgctgtaaccaattaccataaacgtgctggcttaaaacaacatacgtttatttgctcgcagttctggaggccagagtcggcaatcacggtgccagcagtggcagggctgtgttccccctggaggctctaggggaagatccttccctgtctcttctagcctcgggtggctccaggcatcccttggtttatggccgtgtcacaccaatctctgcctttgtctttacttggccttctcctgcttctctctggtgcctctctgtatctctcttataaggacacctgccatgggatttagggcctacctggataatctaggatgttctcatctcaagagtctgaattacatctgcaaagacacctttttccacatttacaagtcacatttataggttctgaggcttaggatgtggacatatctttttggaggacaccgttcgacctactacagctgctattatttaaaaaattttttagaagatacaagtaatacatgaagacattctcaatataagcctttagacattaagttaagcatctctttggccatcgctgtcacctccattcccatcccctgaggtcaccattgtgatgagcttggagcttatccttccagaccttcctgttagggtggaaagatacatgcaatctttacatacagggattattgtcctgttgccaagcactgggataggtcttgggtattctgagataagacatagcattataagaatattatttaaaaaagcatcttaaacacttcactatatacattacagttcggtgaccaccgaattaacactgttaatagtgtagctgatgagtcactttcttttttttcttttttctttttgggacagagtctcgctctcttgcccaggctggagtgcagtggtgcgatcttggctcactacaacctctgcctcctgggttcaagcgattcttctgcctcagcctcccgagtagctgggattacaggcgcccaccaccacgcccaggtaatttttgtgtttttagtaaagacgggtttcaccacgttggccaggctggtctcgaattcctgaccttaggtgatctctccacctcagcctctcaaagtgctaggattacaggcgtgagccagcacgcccagcctgatgtaacattaaaaaaaaaagatacgtcaactttctttttttttttttttttttgctatcaaataccatatcttattcattcttgctattttttgtacccattagccatcccttcctccgccctcctccctccactacccttctcagcctctggtaactatcattctactctctgtctccatgagttcaattgttttcatttttagctcccacaaataagtgagaacatgagatgtttgtctttctgtgcttgttgtatttcacttaacatagtggcctccagttccatccatgttgttgcaaatgacaggctcttttcttattaatggctgaatagtaccccactgtgtatatgtaccacattttctatacccattcatctgttggtggacatttaggttgcttccaaatcttggttgttgcaaatagcactgcagtaaacgtgggagtgtggatctctcttcaatatactgattttctttctttcgggtatatacccagcagtgggattgctggatcatatggtagctctatttttagttttttgagaaacgtccaaattttctccacagtggttgtgtgaatttacattcccatcaacagtgtacaaggcttcccttttctccatatcctcgccagcatttgttactgcctgtcttttggattaaaaccatttgaactggggtgacacgatatctcattgtagttttgatctgcgtttctgtgatcagtgattggagcaccttttcatagacctgttagccatttgtatgtctacttttgagaaatgtcgtttcagatcttttgcctggtttttaattggattattagatttttttcttgttgagttgtttgagtttctgatatagtctgtttattaattccttgccagatgtgtagtttgcagatattttctcccattctgtgggttgtttcttcactttgctcattgttttctttgctgtgcagaagcttttgaacttgatgtgatcccatttgtccatttttgctttggttgcctgctggggtttaagtaactttcttagaaagtctgcatgacccacagacttctggggcagtaggaaataaacccatcatctccatgcagtgtaggcggtggtgtaatggacacatataaaaagtgctgtggaggccgggcatggtggctcctgcctataatcccagcactttgggaggccgaggcaggtggatcacctgaggtcaggagttcaagaccagcctgaccaacatggtgaaaccccatctccactaaaaatacaaaagtagctgggcatggcggcgcacgcctatagtactagctacttgggaggcagaggcaggagaatcgcttgaacccgggaggcagaggttgcaatgagcctgagatcgcgccactgcactccagcctggcaacaagagcgaaactccatctcaaaaaagaaaaaagaaaagttctgtggggacacgggagaagggattatcatttctaaagtctttgcttattgggggacacctgagccttgttggctttgaaagaataaaccttgacagacccacgtctggggacttgtggaaggaaagaacccggaagggatgttgcctgcagcaggaagtgaatcctgagacaacttgttcatagaggatcttgattgtcatcctcaaagagttggaatttttttcatggggcggtggaattcacattgtgtcccgcagggctctagggctctgagaagagaccaccaggccaaggcagggagaagtgaaggaaggaggaggccagcactcagggccctcacccggactgtgtccctgcagcctctgctctctgccaggtgacatttgcaggagctaatgagtggcttgagggggctgtagttacctcccaccctgtgtgcatcagctgtccccaaaccttcccaaataaacatgcaaacaaaggaaaagcgtgtgtgctctaggccacttagctatatcgacaactgacaataataggcatagagtgacagaaagacctgacgagatgccacttggcttcctttttcaagtaactctgtagggttttcccacataacagatacagaaagaatttattgttggaaaacggggcggcaagatggacaacattctctgggaccaacgggatgtgcagcctcctgggctcaggcctcaccagctcctgcacagtggtgggggtgaggactgagggacacatcacatctcctgggagcagaagacgatgtctgcgaacccagctcaatatgcatggccttgtccccaggcaggggcggcctcagctggccaggtgtccccgtcactgcagagttctggtcttagactggctgcacacggagactccagggcagcaaaacatcttctttcctcaccctcaggctctctgagccagcacctcctgatccagatccatttctgaactcctggatccaagaccaaggtcattctcatcaacccttaagccagtgaaagactcttcctggggcctcgtgtgctggtgcggcttccagataatgatagccaaggtcacacttgccgagagccctggtgattcaggcactcttcttagtactttatgcaaattatctcattgaatccttacaacaaacctctgagggagctggaattaccatattctttccatggaggaggaagcgaagggcagagaggtggagccacttgccctgctcacagagctaggaggaggcaattcgcaatgtgaactgggtggctgcgtctccctccacgctcttcactgctctgcccacctgttctcagtccactggccaaccagaatactgtcccagatagcaagtgtgacactgttgccaatagcagggttcttggtaagatgccattccagagaaggagtctgctaaaaaagaaaataataaaaaataaacctgcgactgcagggaatggaaaacacatggatgcatttttttaatgtgagatgaatctttcctgaacagttcaaagtgcctatgcctgctcactgttaataagaaaagagttgaagggtgaaaaattaaacaaaaaaaggccttcttttccagaagagagggaagaagaaataagagagagccacacctaggtcgggcgtggtgactcacgcctgtaatcccagcagtttgggaggccaaggcgggtggatcacttgaggtcaggaattcaagactagcctggctgacatggtgaaacctcatctgtactaaaaatagaaaaattagctgggcatggtggcatacgcctgtcatcccagctactctggaggccaaggcaggagaatcacttgaacctgggaggcagaggctgcagtgagccgagattgtgccactgtattccagcctgggcgacagagtgagactcagtctcattaaaaaaataaaaaaaaaagagagagccacacctagattcccattactgatccaaagaaaccaagttagcggttccattcctgctgcttctgcactgattgggagggaagcaggactgcggcagtcctccttgttcctcatcacacaaccgaatggtcctaggagaggccgagagagaaggctacagcttgctccggtgccccattcttcccagggctgcagtctactggtctacttgggatagcactcgagccttgggagagcaatgaggagaatcgttggcgtctcagaagtggagaacaggttcccatccaagctgagctgaggggacgatggctcaggtcagagctggctacactccccttgccatttgttatctttttagtgcagggatgtgaaagggaggggctggggtgggagggtgagaaaggccattttgttgagtgcttattattgtgcagccagcaggatgctgggcattttaaaataggatgtcgcaggcgtcgtggtgggtgagtactggctctgttttacagatgaggaaactgaggctcaagattttctgttaataagtgttgaggcccgagtctacttgaccttaagccatctgaccttaagacccttaaggtcttttccgggagaccttggtagccaaaactaatcagtgaagagcttcatgagaacattcttcccctacttccatgcctccatgcctgaagcagcctctgggatgtggcattctttcttgtgactggtggaaattaaactctaaggaagaaccctggaagaaacattccagagttgttttgcttttatctgcaaattagcagcaaacagagagcctcttcatccacagatttcatcattgtgcttataatgttaaaaatacactccatgcgtgtggttaacagcaaatggcccagtcatacacatgctcggattgccagagcatcttctcttccctttcgaggcaccgccttttgcacgtgccgagctttagggcttccttctttcggaggagatgagcccgaattctttttccgcacccatgtttcttctgggggagacagcaggtgttatagaaggagcacaacttgggattcagccaaagttggctttgaattattgctgtgtctgtgggcatgtcacttagcttctctgagcctctgtagaatacgggaaacaggttactcaaagaattacatgagtgggtacaaataaatgtctcagtccttaacgtcttgacattccttctctacctggagccaggggcctcttttgattctcaagcccttgacattttataaagctatggagatcaaagatttattcctccctacctagacaaatgagatttccctgaaattacaaatgatttttctgcatctttccagctatcagttaggaattggcaaacattttccgtaaatgcccacatagtacatgactgtgcgggtcacgctgtctctctcactgttactccactttgctgatgcagcctgaaagcggtcatagatgatacataactggctgagtgggactgtgttcccataaaacttcgtttacaaaaacgggctggatttggcccaggagccatagttgctgacccctgatgtagagtatggagaggtactgggtttaggtgctggaaatgcaaaaatgaatgagagtccttgacctggagggttctgcctgtaacacacttgcacgtagtgttggtaagggatattctatttgcaagaggacatttaaggtaacaggaaaggcaggtgcctttggttgttcttacaggctggtgtcactagaggatcaacccaggtgtatctaaatctgctcctgcctgcaagggtgagctcctcagacctgccgcttaaacatccttgatatctctcagtgctattaaatactgctcagtggtcccaggccaatttttacatcatagttttccttgggattgtagcgtatcttaggaaatcctacatccactccccatgttactgtaacactagcgcgagccagttcagattctcggttttggacagctgcctttctttggcatcatctggttgacctgtgcctcagtttccctggctgttaaattggagttaaggatgaaatagtgcatgagaactgatatggattggctgtgtccccacccaaatttcatcttgaattgtagcccccaccattcccacatgttgtggaagggacctggtgggaaataatcgaatcacgggggcggtttcctcccatactgttctcatggtagtgattaagtctcatgagatctgagggttttataaggagtttccgctttcgcttggctctcattctcctgcctgccaccatgtaagatgtgacttgctcttccttgccttccaccgtgattgtgaggcctccctggccatgtggaactgtgagtccattaaacctctttcctttataattacctttattagcagtgtgagaacagattaatacaagaacatttgttccctgttttctaaacttaaaaaaaaaatcatgtttgtgtaaccctttaagaagaactcctccttagcaactcagtaggggtaatgggtcaaagtagaacctaccctcataggagaacacagggagggctctggccaatgagccttgaaacatctcctggaaaccctgggacctgggaggagaggctaaaaacaaccacagatgtagggcagagcaggagaagtctgcagcccagggacccagccactgtaaggctgctcattgactcttcaaaccttgtttccctcatctgaagcaggagcgagtttgggttagttgaatactttccactcattgcagtaggtctgagtgtttcaccaattggttgaaaattcataacttaagaatagttctatattggtagcttcagcctggaggaattctaggcagttgttgatttgtgcttttcttataggtgatccttaaaagtctgttgatataaagaggatggcagagagtttggcatgttaccccgtgcgtgcaattgaggggtgtgtgtgtgtgtgtgtgtgtgtgtgtgtgtatgtatatgtatatgtgtgcacgcacagcctcttggcagtttgcctcttgcctcccatctctgctctgcagccagagtgactgaagtgtgagctggaccagcctctctcttgcttaaatccctcataggtttcccccgtcggagcacagaccaaagccgtgctcatctcccttatgcttcaggctcctcccagatgcctcatccatccctgtcctccgtggacttttcacagccttaactgtctaatgaattgtgctgactgctgtgtggagactgtctctcctggtggattgtatgctctgcaagccccgggacttcctctccccctgtcacctgcagagagtctgactactcaatggaatgtagtgcaaatctgtggaataaacgtatgcataactagtgtgcatttgtggaatggagcagtcagcccctcattctgggcgagggctgccaaaccccaaaaccaccatgccctcagcgggttttccacagagcccagaatgtttctctgccaggtgctgggctgggatggttcttgcaggatcctattggagcttcctaacaaccccaccagggcagcttctgttgtccccattttccaggagggaagtaaggcccagagaagtggagtggcttattctcggccacgcagctgagtcagagctcaggcccagctgactcaagtcttgttcagtctttaaaaaaaaaaaaaaagaaaagaaaaaaacacttacttagaatgaggaaataaatcgcaacaaattgtctttatttattgtttcgagatggggtctcactctgtcaccatggctggggtgcagtggcgcaatcaggtctcactgcagcctctgcctcctgggatcaggcaatccttccacttcagccttaagagtagttgggactataggagcatgccaccacacccagctactttttaaatattctgttgagatggggtctccctgtgttgcccagactggccttagactcctgggcccaagcgatcctcctgcattggcctcctgaattactgggattacaagcatgagccaccatgcccagccttacaaattatcattgttaaagagctgatacataccacaaataccacagaatccagacaaacatcataggttaattaattaaccatcgggtactcttctctgatcccttttctcctacatttttaagctgcatactctgatagcctgttcagaagacagtactgttacatcattttctgtacagagagtagaaggataattcagtcgttcttccagcatggtggaacaaaaactttccaggattttgcttgaaattttaaaagcaattatatgaaagaattttacagtgaacacatgtatacctaccacttagagtctaccattaacattttgctgtactttatcatctgtttttttatccatccatctatgcgtgcatccatccatccattcattcattcatctgtccatcattttatcttttttgggatgcatttcatagtaaattgcagatgtcggtatatgtttctcccaaaatacttcagtaggcacatagaactttaccatcgccccagaatgtcccttcatgccatttcctggtgtttcccactccactctccctgaggtattcactgttctgattttctttccaccatagacatgatagtttctttctttcgatttaaaattgcgtgattgttacgttgattttttgaaaggttaacaagtcatgtacatggtaaaaatctacaaggtgtaaagttttacagataggaatagatcatcgtctctcctctgacgcttgcttctcagtgccttccctcaaaggcacccatggctagcaggttcttacgtgtctttatagaaatggttcatgcatatagacacgtgtgtctcccaacacgctaatacttcaagaggatagtagctcacctgacactttgttttgtgtctagcttttgtcatttgacattatatcttagagatctcctcctctttagaggagatgcctgctgttcttttcatagctgcgcagcctggctatgagtgtgctgtgttttatataaccatttcattccttgtttccaggcttttattaccctaagtggtattgcaacaaatgtctttgtatccttgtctctgtgcttatgttgtccatcactctttatttcttggaaagaaagtagatgtccattcttagtgaagtagtaagttcgatcatttccccatgccctttgcctcccaccctttccctgctccagccattcatccatccatctgtccatttttacatctgcctgtctgtccatccagtgggaacattcactgagcgatcagatgtgcctgcctaccacgttggactctgagaatattgtcctctacacccttgttatcttttgggaaaaacaaatgtgtcaaaaactgattcacagaagtgtgatagtctatgtttgtgtgaggtttcagtgctgcccagaggataaaataaaaattctttaaagctcttatttgccaagtttttactcctagcaaagaatccttgacctcagctgtttttaaaaaccacagagaacaaaaacaacaacaaaagccacagagatatgatgcctctagtggtatgtttgtaaagcaaatgaaaaaactaacagagaaccctgaaagtgctccagaactggggggctttgtcctgaaggcgtggatagcccaggctgactttatgatcagatcatcaggcctgagcctgttgcttggcttgaccaaccaagctgagagacagaaccatgccatttcacattctgttccttattaaaagatgagatgagaaagcaagcgcattggtgggatggaaaacagttgtcattttttggcagtgaaaagggagagctaattgcataagggcaggctatttgaaaatagggatgagtgagaaagtgactctggaaaacaaattatggctgccatttcatgattggaacaaaggtttgctgcctccataggatcttccttgttgcttttctttggagcagtgaatctgagaacctggtaattagaagaaagaaataagattctctttctttggttctttttttgtctccaaactaacttatccttcccatgcatcaagattttgaatttgctacaaagcaatctaaaaatctgttggcatttcagggtggaaacatagcatatcttatgattcattcattcatgcatgcatgcatgcatgcattcattcattcattcattcagtgtgttagttcgtgcctacatgtgctgggttcttggccaggctgcagtgtgtcatggtgaacaggtgggtgtggtaagcacatatagagctctctgagctcacaaggagggttccaatccacagataaccagcgtggagtcattacaagctgaagaatgtgaaccgtagagggttacagtggagacactgtttagttctggtggtctgggaaggtgcctcctaggaattcatattttggctgagtcttagatgagaagagctaaccttacagagaggctgaggaagaggagaagggagcagtagcttacaataatacttgcttcgcagattgtttgaagattaactgtgagaccatgaagtccttggcacatagtaattgttcagcacatgctggcctctccctttacctttgttgattttttctaatagggcaatcagaggctggttgtcatgaggtaggcaaggaagaaaccaaggtttacggaagccaagtgacttctcacatcatcagaggaagcccaggattagaactcaaaacatgtgcatttctgtctgttcctgagagcttatgtacttggctcagagtctggaggctgacctgtgttcccagagatggaaaaggacctgggacttcctaggggcaaagcctcctaagtcttcctgcagcagcaacagcaaaataaaatcagaaaacccccaagctttaaggaggctcaaggttttagacccagttgtgcatctgtatatgtctactctggagctattgagtcctttcagattttcttcacccatcagaggtccgtttaccagctaaggctcttgagtatgaatttgggttacttgatcttctgggcatcccagaggcaagatgcgaagaacggatactttgtagtgggaggcagtatagcttagcagttagaagagcaggctctggagccagaccacctgtgtttgaattccacctatgctacttactacctgaaggaccttgggcaagttacttttatggattatatgtctctgtatgtgaaaccaccccaaaacttaatggctttttaaaaaaacttggctatttttttatctctcatgattctgtgggccgactgggctcagctgggtggttcttttacgtcatgtggtgtcgaccagggcttgactgagctggacatccaagatggtgctctcatttatctggtagttggtgctggctatccactgggacttcagatgggattattgatcagaatacctcatgtggcttctccacctggagaaagcccgagcacctgaaggcactgaggctgagtgagaggctgctgagtagactaagagatttggcttgggctcctgatatctttacttcctctgtgtttattcacagtgatctctcttgtccttgcccatgaaatcggaagcacacctctgcccacctgctgtggaagagctttgtggagtgggcagcctttgatgatactgggtggtggtggtgtcatgcttgcacacccctcaggactagaagtgagggtagctccaatgacagaagggttccctgttcatctttaccaccgccttacctgggggtgtggtaattttttttaccacaatgggaggaggtgtaatttttcttctacggctttggcaaattggctgattttctttttctctccctcttctgtctttcctttttatttaaataaacatttattcaggacatagtggatacttttcattctttttggcagaacctctagtgtcttcccaggtttgaggacttgccagtcaaagtggcagggtgggcctgtgtcagagttccacgctggcactggggtcagagtttcatgactagggagaagagacttcttgtctctgttctgtccctgctccccatctgccccaaacaacccaggaaatcctgagtcagaggagatgatggaaacttctttgctgatgcagcccagaagtggattccccgttggtctcatctaccatttcacatccttgtgtgtacagcaccgagggtgtttgctccagcatgattcaggaatcctggctgctctgttgctctagtaacgggctttgcctttccttgcacctgaagactgccgcgtgagtgcccagaccacaggcagagtgtgagctgccttctctgcagggtcagggagaggtgaatagagatagccatgttgctgatggctggtttgtgccccatattgagggtaaactaaagagaaatctgcatcccagggatgtgttctccaagattccccagacttcagacaaacaggggatgtttgtggccagtgtcagtagaaagttgatttttcttacaaaataatctctgctccacactctttattgccagaatataaaatagaatcagctctctaaagggctgctgtcaagtctagctaatatctggctccagtcttgaaagacagcaagaaaagacaaaatttgatgttgagtaagctcggcctttaattatcatcatgcatttgctacagtgcctggccttgttatcaagttatgttcctaacggaggttagaaagttcccaaattctttttcgaagcagcctccctggtactcatgtagacacacaaaatctccgggtttactgatcctaataatgccatgtaattagaagaaaagcctctaagtcagaaggattgaaccactcctgggtacgcatatcccctgttcaaaatgttccctgaaaatccccacccctcaggggaaacttacctacccaaaaaataccttgttccagaattagtcatttttgaagaagccctttgttttcgataattgtagagtaatgtctgtccttaaaaaatctgccttgtctttcaccttggtccttttggttgccttctgcctgtgctctgtggggtagatacagccagatgttcttgtgattgaggttcctgggtgcaaactctgttcacttccagttggaaatgaggctgcatctaaaggcggtggcgattgtgtgtagcagtggagctggtgtcctgatggcttgtgagtccccctctggtctgcccacttgatccccatagcgtgcccagaagagcttttcccagcctcagtgctgagtgggaaacccagaaaagaggagtggccaagagcagccctacagtgtctgccagagaagatactggcgtcctccacatggatgaaaagaggagaatgggtgttgtctagaacggggcgtggccttagaaccctttctttgcccttttccatccatgatgcgtaactgttaggaaggcaccatctctgacaccttgctttctggatttgagtgaaatgcatggagtgggatgaggtggaaagggtatttgattacttagtaatgtgatacacacttaaattgatatataatgtatctgcttatggttatgcagttaatacgtcttcattgtagaaagtacaaaaaagttcaaaatagaaaatacaaattctcttaactttctttatttttttgaaacagggtcatgctctgtcacccaggttaggtcactgcagccttgaactccaggactcaagtgatgctcccacgtcagcctctggagtaggtggaactacaggcttctgccgccatgcctggctaatgtttttttccattatttttaggagagacaaggtcttgctgtgttgcccaggctggtcttgaactcctgggctcaagcaatctgcccaccttgacctcccaaagtgctggagttacaggcatgagccgcttcacccagtctccactgttgatttaaggagagccttctaatgtgtcctaaccttcaagtttcttcatttcttcttgaagccttcaagactacttcagtctttcttttttcaccttttagctgacttttcctgtttgctgagggtttatagcagaaaagctttgaagttggacagatccatttcctagatgtgtgaccttgggcaagttttacagcctccctgagcctcggtttcctcatctgtaaagtggggagaatgatacctgtcctcaggttcactgtgaagcttgctggggattgtggggagtgtggaaaccctgagaggtaaaaggtgtaaattcagtgttctcttttttcacttcactacccctcacccttctctgttccacttggtttctcatagtcttgatcctccttcttaaaattttagccaatttagtttctagcagatcaaaaaaagaagctcattccctgggtatgagaaaaatatcaacatttattgaacatctaccactactgggcattttgttgtctgctttacataataattgcaatacttgtgacagctgtgagaatcagtttcctatctgacagggagctgaggataggtagcttactgggggtcacgtgcacctttgaatgcttgcttgccctcacccccacctccacagtgtggggtcaggacccctaagcagtactggtggtggggtccaccatgccacacagtttagtttctctcccctagtcatcatctcatgtggcccttctgagtcaggagaagccatattctgctgcctcaaattgctcgtacattatgaggggaaaggatggagcccttgtgggggtgacattggccttttgtgtttacctactgggtgtgtctgtgtgtgtgatgttcatcatggtaacaatggatattttttccattgcacatctgataacttgcatctcagatcctaattaggcctttatcgctccaaaattacatgctcttacatgcctgtgattatctcaataggattaacagtcccttggccataaagataattgagatccctcatggtggcatatttttattgctgcaacatcctctccaaccatccctccacacaatctcttaccgttttccagtgactgctttttcacttcattctgaataggaaatgttcagggatctctgagaggcagaattcttctgtgattatgcaaaccatggtaaccattatgcattttttctcccctctcccccttctcctgatggtaggtgcctggagatttgagtcaaacgtccgaagaccagagtttgtcggattttgaaatgtaagtccacagcctgtgctcacaaggggtcctttagaaactggactctgttgttggcttctgtcccagaagaccacagggggaaacagaaatcactgttgagacccacacaaggttgatgtggttcttgtagagctggtaggagtcgctctcctacagcctcagtctcgccctcagatgtgttttttctcacccttgggtatttaaaaacattttttttttttttggctgacatttagaatttggaagctatcacataacacaaatttcctttattttctttaaaaatgagacgcttgtccctgtgaggccacagtctgctggagctgagtaaaagctatcccctttgcacaggggcatgtgccgtccaattgaccacagttcccgctctttgctgttgcctggaagtgaccgacttcactcattttatgatctgtgtggcccctgggttattggaaacaacagtagtccatgccttggtcggatttttgattgggttcaattctatttggcacctctgctgagccacccatagggagagattagttggtcatcagacttttttatttttgagatagaatctctgtcgcccaggctggagtgcagtggcacgatctcggctcattgcaccctccgcctaccgggtttaagtgattctcctgcctcagccttccaagtagctgggattacaggcacacaccaccacgcctggctaatttttatattttttactagagatggggtttcttcctgttgaccaggctggtctcgaactcctgacctcaggtgatccacccacctcggcctcccaaagtgctgggattacagttgggagccaccgtgcccagccgatttttgttcaggatttcttgggctttggacaaatagatcccttaggctggtaaaggaaatggataagttgtctcctctctcattcatctctggcgagtttaaggttcagcacccgttgggaagaaaagcccgggaaaagtcccttttagagcaggcagggctgggccttggaaagagcatctcttcagaggcaggctggcctgcgttgaaatctcaggcatcagtccagccatttgacctcactgggcctcactttcctaatttgtgaggcgaaggtcctgatgcgaaccttgcagagcttgtggtggcgatgagtgagattatgaaaggcatgagggcatcacggggctattcatgttggggcagctgctggggtcgggggtggcggtggctgttaggctgatagggtggagaggctgaggtgggtgagaggtgaaggatgaaaatcaaaggtgaatttgcctgctgtgggcttgtgggcagggggagcatggcatgaagaggctcctggaacggcagagtccggcggagggcagctgtgggaagaaactgggaagacaagagagagccacagaggggagtcccagacacgaggctggaagcactcattattaaagcaagaattcacccatgtcctgctgcaggctggtgtccgggcaggtccctaatagagaggatgaattagccatggtccctgccctcaagtggtctctgcctgatccaggccacattgtctctccccagagatttggaacctcccccaaccagtttactcatctacactaaagccagaggcagcaatggcaccattcccctctcagcatggagactgaaatcctttgtggagcttacgaagaaggccctcactcacctctggcttcgttcccagcctttcccactcctctccctgcaccagccatcctggcagttccgctcctctaacccacttggtcctctccctttaggattattattttacccacttaaaccacttgtacacagcattgcctctgtgctggacactgttctaactcactcagtccctacaacaaccttcagagatgggtgtctcctcacggatgatgaaattgagccgggtttcaaacccaggcagtgctggtctagactcagtgctctccacaaatgcttattcccctgcctgaagcacctttctcatcctcaacttggccaactctaaatatcccttaaagcctggccgaaacattgcttcttcaaagaagccttctctggtgtcccagaccaaagcaggccctggaagtcactctccttagatccagtgttcctttgtggcacttacaataatagtaaataatttatctgtaacaactattggcatatatacacctgacaacaaagcttcagaacatgtgatgtaaaaaatcaacagaaatgaaaggagaaacaaacagctctacaataagacttgacttcagtacctcactttcatttatttatttatttatttagagacggagtcttgctctgtcacccaggttggagtgcagtggcactatctctgctcactgcaagctccgcctcctgggttcatgccattctcctgcttcagcctcccgagtagctgggattacaggtgcctgccaccacacccggctatgattttttttgtttgtattttttagtagagacagggtttcaccatgttagccaggatggtctcgatctcctgacctcgtgatccgcctacctcggcctcccaaagtgttgagattacaggcgtgagccacagcccccggcctcagtaccccacttttaataatggataggataactagacagatcagtaaggggttagaagatttgaacaacatgagaaaccaattagatttaacagcagaatgcacattcttctcaagtgcctgtaactttccaggaaagactgtatgttaggccacaaaaccagtctcaattaatttttaaaaattgaaatcatccaaagtatcttccttgaccacaatagagttaaatttttttttttttttttttttttgagatggagtctcactctgttgcccaggctggagtgcagtggtgtgaccttggctcactgcaacctctgcctccgggttcaagtgattctcctgcctcagcctcccaagtagctgggactacaggcgcgtgccaccatgcccagctaatttttgtatttttagtagagacagggtttcaccatcttggccaggctggtctcgaactcctgacctcagatgatccaccttcctcagcctcccaaagtgctgggattacaggtgtgagcccctgcacccagcccacaacagagtaaattttatggagatttgtctctctcccatgttaaaactgaatgctccagaagaaagggctgtctgcttcttttattgctctatctccagtacccagagtagtggcttctcagtaaaacttgtttaatgagtgagtgaaggaacaaaaggatgaacaaatgaactaacatctaggagggagatgggtcacttaaacaatcaatttctgatacagtgtggtcaatgcactgaaagagagaaccatttaacccaggctggggtaacctcgctctaaccctgggaggttgtccactcctcaccaatccagaaaagttaataaaaaccagagtgctacttatatttctgccttgtagcctgacacagaaatgaaaggagaatgttctaggcactaatacaatttcagggacctttccaggaggaaagtgattagatacacaaaccagttttgatggctcagaattgcaatgtacaaattgccttgagccctggggaagtgatcaatggggtttaatttacccctcaaaggaggtcagctcctctgctcagagatgagaagaaatgctatttcaggagagacccattacctgaagggttattgtcattgtgaaaatgaaatggtctttactctagaggttgtgagaacattgagtcgtggaatcttccatcaccggtgtctcaaattgtgttccaagcccagaaggctggcgagtttttatgagctgctcttgagagagaaggagagctcaggagaaagcatttagccctggaacagctctaattagaggcgaaggccgggaccttacagcccttccagaatggtgcagcaccgttttgataattattacaattgatcttgaagtttcagggacagtcagcttattcgctctgtgtaatttggatccagccgggtacaaatgtgacagtgacttacgagttaagtttaaagtcatcacagaagacaaaacaatcacataaccaaaatatctgttaaacatgcctcacctggcccacgcgaggtgagaaataaatgatttgaccataggtaaaagcatggagctgtgcgtggtaggtgctcagtaaattattttgcatttgaatttaaaccttggtgtattggacccatatacacagtgtttttggaaaagctgaaagagaggtatttgtacccatcagcctggttttctaacttgtcattttctctggtccctccctcctcccatcctaaacagctgtcacccttgttgccatgagtgttggtctcctgagctcgtttgtggagtctgatcttaaaatgggctcagggtcagggtctaaagtcagctcagtgaggaggcagcgtgactgctgggtgctccagaaacgctgggcattgctgtgtgtgacctcctgtgatcgcgtccttggggcttccggttattatcttcattttcagatgtggagactgaggttcagatacattatgggccagatcactccataagaactgaagggagctctttcacattccggagtacagattgtgtgtgtatgtgtgtgtgtgtgtgtgtgtgtgtgtgtgtgtgtgtgtgtgtgtgtgtgtgtagagagagacagactgagtgatgacttaaacttgtcctttagcttgccatcaggtgtgatgtaagttgtcataaattgcttgtgcataatacctcttggagtagaaaattgtctcctttcctcttttttattttttatttttttgtaagttaaaatgtctaatgttggtctctctctcttccttttggttagatcaaaccgggcgctgatcaacgtctggatcccctcagtgtttctccggggcaaagcagcaaatgcattccacgtgtatcaggtgagtgcctggttttcaggtggacatcacagctgggtggaaaaacgcccatttgtcatgctgtggtgctttttgcctcttggtggtggggcgctatgattaggaggctatggccttccagacacccacatcttaactgcccagaggccttgccgaagaagtctgtggctttcagttgggcagggggatacggtgggcctcttcgtgccagtcaggctcttagtgtggctgctgtggaatctcagctcagactgcatgagcagaaacggagatgtgtgtttgcttgttttgcatctgaaaagtccagtggtaggtcgggccttgggcatggctggacctgccatcaggaacctgctgccatatcctgtgtctgctgcttggtgaccctctcaggccagctgtccgtgggttgacaggatgaccccagcagcgccaggttctcagcctggaagggcgggtctcactggtgtgtcctggatcttgagcctcttcctacaccttggggttgggtgacggactctgtgactggcctgattcagctcatgtgaccaccactgtcgccagggtgggtgtttacctcacctgaccacatgtctgagagtggggaaaggagattccccaaatgagagccagagaattctttccaaaagaaggggcaatggatactggacaagcgggacctgtagacatcgcctctgcttccttggggtacggatagccgcacccaggtgggcattgagtgtctggggcagcgaaatgtgtgtctgcttaggaggtgattttacccaatcaaggggactccagttctccgtctcctctctgattttctgaagcctcttttagccctgcccacagctcgtctgcatgtctgtcttccttctcctcctctctcttaccacggactctgatttccaggctttggtgtgcccttgttctgggactgctttgttctcagtgctgagccccagctgcttcctgcttctcctgtctgcttgtgctaaaataattgtcgttaggttttgttttattccccatgagctctctgcaaacccttggattttgttgccatttttcttagtgagaaattgacttattgaagaaattttcttgtctattaagatatttttccccaaagagtggggtgttgaagaaaggacactgaacttgaaagcggaatccctggtttaaatcctgtgaccttagatgagtcttagtttcttcagctgtaaaatggagacagtaatctatcttgtaaaactgttttgagattagaaatacctggcctgcagtagacactctattcatttctcaccttcccaaatgaccgctgtgcttggtctcaggtctaagcataatatgcacatcttactggaaatcttagggacagatgagctagactttggcatgagaagtttgttttagtttgacaccttcagctgggcaacagtcataggagaatcttgagtgttcatgttgttcccagctccggtttaaagggagaattagatattatggattttcaaaaatcctcttctctttgtttctccttttgtcccccacaaacccaactttcttatttgacccttcaagttctgcattgtggtcatcagagagctggaaggtgcagcctggaggatgaaaaaagtacagcagacagctctattttagagcaaaattaaaacatgttatcacttgagaggtttccttgacctttcagttttgacttttccccctgtttaccccatgaagcaacttggcaatttttagctcctgaaagctatgaattgagacggaccttagcaaatatgccgttgcctgggagattgtttccacagtggccactgtggcagtgaagccactctctccccgtcctttacggtgtgaagctctcatgggttcagccctgcttccagccagcctcaggcctggccgctctgcatcgctgggagcaacttcactccacgcctttggccttctgcagccttcctgatgctggggtgtgtgaagtggtgtctcttgcatgcaattatttttctctttttagcaaatgatgcttctgattggtgcctgcagagcaaaatcagagcatgtgtttggaagcattttagaaatcctttattgccatgtttttactttatataaatgatattgcatagaaggtgactcatttaaaatactggtactgttgaagagtacttattttagaattaaaaaagtatgctggccaagcatggtggctcacgcctgtaatcccagcactttgggaggctgaggcgggtggatcgcctgagatcagtagtttgagaccagcctggccaacatagtgaaaccccatctctactaaaaatacaaattagccaggcgtggtggtgggcgcctgtaatcccagctacttgggaggctgaggcaggagaacggcttgaacccaggaggcagagattgcagtgagccgagatcgcaccattgcactccagactgggtgacaagaatgagactctgcctcaaaaaaagaaaacaagtatgctatttaattccacaaaagatttgacataatttctagagaaacgtctaaaaaagaatgataaaagagaggttaaaaaaaatacatcagggtcaatgaaaatgtaaactaagggtttaaaaggaaaaagcggaaagcatatatatgtgtcatgagattctacacagttgcactcattgatttatgaatttcctgtgggcttcctggcagccattgtgaaagggaaatgtggttatttggataattctgttgctaatgataagaaaatatgttaattctttaaaagaagctgtaaaagaaatttccacacaggatttgagattaaacaataaaaaaggatagagtagacaatccccatctacattcccgtgacagccactgtctggttttcttaagatttcccttgaaggaaaccaagggcataaccccaaagtgaacataaattcgactggagagccaagacatgtagctttctcaggagagcggtgctccctggtactggagctgcgctgtctgtaccagagctcctagccatgtgtggctcttgagatttatattaattaaaatgagatttatatcaattaaaatggctcatgcctataatcccagcactttgggaggccgagatgggtggatcacttgaggtcaggagttcaagaccatcctggccaacatggtgaaaccccatctctactaaaaatacaaaaattagctgagcgttgctgttgcatgcctgtaatcccagctacttgggaggctgagacaggacaatcgcttgaacctgggaggcagaggttgcagtgagctgagatcgcgccactacactcaagcctgggcgacagagcgagactctgtctcaaaaagaaagaaagaaaatgaaagattcggctcctcagttgcaccacatttcacatgctgagcagccagacgtggctgatggctcctgttctggacagcacagatctggaacatttaccccacacacagaggtctgcagggcggctgccttggaacaagctctcctagcgtgtgggatggcaagatggtggtgtatgtgccaagtcaggatttagaaggaccacactggccatgaaaggccacatcctgcggggagaagggcccccgctttttcagcccttcatggcttccagctccttggaagaggaagtctctgtgtcactctcttacctctcatgtccctctgatctttcttaggaaaaacagcaaggctggggtcattgcctttggcaggtgacaagcttaaggttaattagattgttttttttttttctgtattcatttttacatttgcctcctagttatgtcacagaattctatttttccatttaccatggtgatgtacagtccccctttaaaatatattttaggtaaaaaggaaatgagtcagcttaaagaaagctactaaataaacaatcgtgaaaacagtccaaagtttagcatgatgctctatgaatgattgatatttgggtagcactataaaggaacagatagactgtgattaacaaataccagtataataattagtagccacctctcactggtttgtgtgttgtgtaatagctcattcaatccttgtagccatcctgtggggtaagaaactcttaccccattttataggtgaagaatcaaaggcacagagaagcatctcatttactgacatgtttttcagcccccaaagcagtctctgacaaggtcctggtctttagagattctgtgttactgaaggagggctgaatcaagctctttaaaaatcctaaaagcagctgtgcatgatggcatgtgcctgtagtcccagcagctccagaggctgagataggagaattgcttgagcccagcagtttgagcctgcagggagctacgattgcatctgtgaatagcccctgtatttcagcctacgcaacacagtgagaccctgtctctccaaaagaatgtaaaaattaactgggcatggtggtgcatacttacagtcccagctactggggaggctgaggcaggaggattgcctgagcccaggagtttgagattgcactgagctgttataatgccactgccactccggcctgggtggcagagcaggacccttctcaaaaaaacaaacaaacaaacaaaaaaaaaactagaagcagctgggacagtcaccctcattccaaaaggcaaggcccagctcaacgaagatctcacctgcatgggcagccacctacacccctgagatggtaggctaagggcaggcctgcagccaagccaggacttttccataggacctctctgggtccactgtggtgcacacattatccagcaagccctccacatccaagagccaggctgagatggtttgctttggaaagttgtcagagcagttgctggtccacaataacttctgtggccgtccagtatctcaggacatcttgtttgagcaatgtcagggtcccagaacctgcctcggggtggctgcttgaaaaagtcctccggccaggtgcagtggcccatgcctgtaatcccagcactttgggaagccaaggcgggtggatcacctgaggtcaggagttcaagaccagcctggtcaacatggtgaaaccccatctctactaaaaatacaaaaattagctgggcatggtggcacacgctgtaatcccagccactcgagaggctgaggcaggagactcacttaaacctgggaggcggaggttgcagtgagccaagattgcgccattgcactccagcctgggggacaggaacaaaacttctaaaggaaataaaatgtcatcctacatgccaaagaaattaaggtaattcccctgctatgtgcagtcacagagcccccactacttctattgtggaaaaatctggaattatatttggcacagaggattctagcaagaagtgctgtgcattgccaaggttgaatgcaaattattgcaaaaagtttgtgttcctgtgtcctgagagggagctgaggtgtgttatgccactgaaaataagaaatggcggcatttgactacttttcaggacaaagtaatatctggagagttcctgattttaagtttttcatccgtgagtacttcttacacggtaggctgtgctgatgcgtggctgctggcaggcactagccggagacaaaatgattaaggagtgtcaaataaaatggaaaacaaaattaaactcaatccagtaccttgttttgctgggtttttctctttctcttgttaacacacattttggtttgatttttctggcacttccatatgacagagttaaatttgttgttaattaatttctagtttatacctttgcagatgtttgatcttattccccaaattccctgactccaaacgggtttgagattcactgtctttttttttttttttttttttttttgagacggagtctcgctctgttacccaggctggagtgaagtggcgcaatcttggttcactgcaagctccacctcccgggttcatgccattctcctgcctcagcctcccgagtagctgggactacaggtgcctgtcaccacgcctggctaatttttttgtatttttagtagagacggtgtttcaccgtgttagccaggatggtctcaatgagattcactgtcttaatatcccactcaagtgtctctaaaggtatgttaggccttaaaaaagctcacctatttgttttcttcaactattacagccatcagattggtatgaagtaatacatcagtgtacttacctgagatcttaggtctttccctttgaaaaataccttcagtgtaagtacatttggaatcagtcttccatgtgggataaatttcagcctttgcgtctagcgaccacaaatgctggctgttgtacaatatttcatttgcgcaacagaaccgattagatcttctttgtaaagagggttgctttgtttcagcaaagcgttttttttgttgttgttttgttttgtttttttctgagagggagtctcgctctgtcacccaggctggagtgcagtagcgcaatctcggttcactgcaagctccacctcccgggttcaagtgattctcctgcctcagcctcctgagtagctgggagtacaggcacccatcaccacgcctggctaattttttgtagttttagtagagacagggtttcgctgtgttagccagggtggtcttgatcttctgacctcgtgatccacctgcctcgacctcccaaagtgctgggattataggtgtgagccactgcgcctggccgcgtttttttcttctagaataagttctgtttcctagaggccacagggtgttgtcttggcctgaggaatgttggtatcccaggaaaacttgttcagtatctgaactcttcccatctcccatcctgcagaacaaaatcacatagcctgagtggttattattattactttgttggagacagggtctcgctttgtcactcaggctggggtgcagtggcacaatcatggctcatttcagccttgaatttccaggtcaagcaatcctcctgcctcagcctcctaagtatctggaactgtaggcatgtaccacaatgcccatatttttgaagagacagggtctcactgtgctgcctaggctggtctgtaactcctggtctcaagtgatcttcccacttgggcctcccaaagtgctgggattacaggtgcaagccactgtgcctggcctctggggacttttaaaggtttaatccagctaagcatatttatatatgtaatgcagggaaagcgtattatttttatattaataatagatcacggcatcttggcaggctgcatgagcttcaggtggtttggaggatggtgatgtttttggacttcaggctttgcgtttctcagctcttccttttcatcctctcttaagatagcttaccccttgggccctcaagttctcttttacccacagctctgtctttatgcttgcttcctgtgtagctatgcagagagggaagaattcattaagtagagaaagatgaaatggttggaccgagtacagaaatgggaactgcagctgcagtgatgtgggctctgagaagcctctgccttagcagataccattccaaatttaggggagagaaggacccgttctaaggctgaagcatttctctcttgctcacacctggtccttcctgtcacacctgttgtataccaggtagacaggagagccggccgtggactgaggcagccgtttgctgtttgatttgtgagtttcatcccagccagtgtgggctcctgtgttgcaggccaagccagaccaggggagcacttgcccttgttcttgctgtgtctctccttgagagctttccaccccggcgttctgaggatcatagcacatgaacccctagctgttcctggaatgctcagggctcccaggaaagcctgatgtaggtgaaaacagaaagccaaaggcaaaatgctctccccttcctgctggacatatgtgtcactgctgtcctctttctgctttatctttccaaataggaagaatttttaaaatttcccttccagtataaagcctttattcgtcccaaagctgttgatcaaggttctgctatatgcccagcatgtgccaaacctgcagaaccagtgggagccaaacttgacattgagctgaccgtcaccagtctcactagtttagcaagaaggcaggctgtgtggggtaaaggtagcctcgctctgcagagaaaggaacaaggaggagggacgggacaccactcaccttgcagcatggatgtgaccgtgtgtgatgacatatgaaatgcttgggccatagctactctgtgaatgttacctttgtgatctgataaccacttgacttgtgataagcaattaagcctggaaggaaacggaaaaagattttccccttgttgaatcaaatgtctctgggcatgtccccgtgttcaaaaaaactgtatggagcatctccttcaccaagggctttacatgggctgcaaagagcaagacagcattttcctaaggtacctggcacctggtggggagacaggacctccatgaaagcaaccgaagttcaagggcggttacatgaggctttgcggaggggtgggagagccggccatcgggtaggacgccccagcctctgctgcagactgtttaatgcacattgctgcttaattcttacagcaacctatggggtaggcactgttttcatgatccccatcttatagatgaagcagctgtgactctgggttgaatgagtccctctgggtcatgcacaagatctgcctcatgcctctgtctgctccacgttgctcctcacccaaccaccaaggcgtgtgcttcacaaatttgtctcagtgaaatgaacctgtttccataacatgtttcctgaaaggaattctgtcactctctcattgacccatcactcattgtcacagctgccgtgggcagctgatactggtgacaaggtaatatttttcacacgggagagagcgctgcaaagacgagagtgtggaattgatgggtccctgggaatgtgacaagtctgttaaggtggagaccttttcagcctcatatgcataaagtcttcgcgtgttaggctttgaagaaaacttagagctcacctgtgtgtgcgtgcatacgtgtgcatgtgtttttgtgtgtgttttgaaaggtacattcagaattataattttttacttggaaagctaaagacatgggctttgtaaatagtctataggtagaggtggacacaccctcttggcaggtgaactgtctgaatttttatatttactttttatatgagaaaatcaaaagaagtgttttgcactagatcatactctcagtagcaaacagagtggaggaattggtgacactttctagccactcatgtttctgctgtgtctcagggctacctggctctctctccctttcctgactccttctgcgcccagaagtaacccatccggagagctacccagtgtgtttatcaggcaagggctggggaggttagagcatgttgtcacgtttgctcatcatggagattggcagcttttgttttgttttgtttctgttctgtggccacagttgtcactgagtatttggttttggttaggaagggagtgttgggcctgggcaaggttcatctcattagctaagttctaatggagaaggggaatgtgaaataatcattacaagtgtggggaatgtctcaaaacgggagataaaaacagtgaagggcatagccaggtcactcttgctgaagtggtgggatctcctaactgcaggcaaaatacgttagcagtaataactgtccttcctggaaatgaaagtgctggggaagagacaggtggcagagggtggggtacagggtggatatgggagcgaataacagggtcctgacttaccgaatggcagccagggtgcagtgatctctcagaagaggcctgaggctacagagaagggagccaggtgaggtggagacagcaggaaggatactgtggagaaggaagctgaggtgtgaacacagaggagtggctctgtgagaagtgacagggccctcgagacaatggcacctcggaagcaacgaagtgacgtgagtgttcagtggtacgctgctgtgcaggggagacagcttgttcatcctctctcctgttgagtcgtcttggaggtgggcagcatgttgagcatacgcaggcgctggacgatcctcacgccaggcgccctgccccgcacttcctgcatcagcctgtggctttgagagccgccttgctgagagtggccttactcacttaccgctcctaaatggtggtgtccattgttctaaatgaggcgggatgtaaattaccatacagtcatcccttgcttgtctgggggggattggttccgggaccccccatggacacccaaatctgagggtgctcaagtccctcatataaaatgccatagtatttgcatataacctaagtgcatcctcctgtagatgctaagtcatctctagattacttacaatacctagtacaatgcaaatatcatgtaaatatttgttacatggtattgcttagggaataatgacaagataaaagtgtgtgcatgttcagtagagatgcacttttttgagtatttgtaatctgtggtcggttgaatctgtggatgcagaacccactgatacggagggctgactgtattaaaaattaaaaatttgagccaggtgtggtggcttgtgcctgtaaacacagctactcagcagactgaggtaagagaattgcttgagcccaggagatcgaggctgcagtgagctatgatcacaccgctgcactccagcctgggtgacagcaagacctcaactctaaaagtacaagtaaaaaagtaagagaggtgtttggaaatcatcctcttttcaccaagtcatattaaccgtggcttaagtgggaccttctaagtgtggtctccatatcccatcttcacctccacggttacagaaacaaaaacatgaagaagaggaacttgctaagctactgatctgtgattcccccggtctctttccttttccaagttccctggttgtagccagctggtcttttctgctccctcacctgaagggagatttctggtaaaagtagaagtcctgcaaagacattttcctgcctggccgttgtttttcaaaagcttgggacgattttgtttgtttatttgttggtatgtatgtatgtatgtatttagagacagactctgtgtctccaaggctggagtggagtggcacactcttggcttatagcaaccttcgcctccggggttcaagcaattctcccacctgagccttctgagtagctgggattacgtgtgcccaccagcatgcccggctaattttttgtgtttttagtagagatggggtttcaccatgttggctaggctggtctcgaactcctaacctcaaatgatccacctgcctcagcctcccaaagtgctggaattacaggcatgagccactgcacccggcctgttgtctttttaaagagactcctttgagaagacagctaggggctaagggctccatggcaggccccagaacaagagagacctcccagggaggcaaggctccaagtccgggcaaaaattccagcttgcttgtgtgccctgggagcagaaaaccaggacccacaaactggcagtgagtgggccactgtctgcaggttggaagtcctttctgcaaggtataagcgctgtacaagcgccacactgtcctgaaggctggggagtgggcaggaccccaataatggctgagacagccttgctgcccactcggcaggattgccttggagtcttgatcaagatgcactcagcagctccttctggcaccattgagtttcatactcacacacagcatttctgatgtatttggatgaggccttgtaattacacagcaaggacaggttgtccatttgccctcacctactgcctggacagagtataaacttaaaaaactttctaaaatgaattaatccacccatgaagttctcctcgcaggcaggttggtattgatgtcttggggtcctgcactatgccaggcccagcgtctgcctccgtcagaccttccatcccacctgatgattggggctggtctaggatgttacctcccacatccaggggaggaagtgaggcctggtgagcggacttggtcaggctgacaggtagatggactctcctccccagcgggtctccatggggaacagttggcacctgccctgaactgccacaccacacactccctgtgctccccaacccaggctgggaatgcccactctctcctatatccaaaatagttatatttatttttagggatgttggaaagggatgcctcttaaaccccatctcccctggggagatcatcttgtcgggaagaaatggcaggacctcttccctgtacagctcgtcctgggagcattgttggagtgggggccgtcttctgaatgtggccagggccgtactgtcagacacatgcatctgcctcagttaaacaggctctgaggatggccgcctggcttgtcctctggtttgaaaaagacaactacagcccctttgcatcagcctgtaggaggtaaggaacccagaactgggcaggctgtgctctgttcggtttctgaccccagagactgctcatgggccctcctccttaaacgtcgagtccctctcagcttttcttaaactgcccctcaaatgcacttagcacagacgcaagcagagccccggggcttgtctcggggcaccgcccagtcactcattggtcattgcagagtcacagttagacaggaggaagaagttctggtgatctgttgcgcagcagggtgactatggttaacaatgacgtatatttcaaaatagctggaagagagggttctgaatgtttccaccacaaagaaatgagaagtatttgaggtgatggatctgctcattaccctgatttgattacaaaacagatacatgtagcaaaacaccacatcatgcccctgagttcgtttgttttgtgtggctgtgaaggaacacctgacgctgggtagttgataaagagaagaggtttctttggctcccagttctgcaggctgtacaagaagcatggtgtcagcatctgctcggcttctgggaaggccttggaggcttttagtcatggtggaaggtgcagggggagcaggcatgtcacatggcaagagaaggagcaagagagaggaggaggtgttactctatcccaaccaccagccctcacatggactaacagaacaagaagtcactcattctcatgggcagggcaccaagccattcatgaggcatctgccccatgccccagacacctcccactaggcccacctccagcttcaggggtgacattgcaacatgatttggaggggacaaacatatcaaccccataactgtgtataattattatgtgccaattaaaagtaaaacaaaactgaacatttatggagcccctgctgtgtgccaggcactgcgcctagtgagatacgcttgagtaaggggaagggcctcccaggtgcagccagggtgccagccacctcaggcacagtacttcttgggagcctaccattccatgagacaatcaggggcggtttgcattctactccataatccatccgtatcttactgtttatgaaacttgcatttccctcaggctagtctgcagtgaaaatgctttgtgtttcttctgcgtagccaggctgtgtgtacctcttggcacactgggcttcctgtgttcagcatctagagtgctctggttccagaagtgagcttccatggaagccgcctctgtccaggtgtctttccttgtttcaggctgtctggctcacctggtctcccagcatctgtctatgagggccaggggcaatgaggacattcctgtggcacatcagggagggagatgagctagtgggtcagagggggtgggtggttctcctttccttccttctctttgctccccgctttgcacactctacatccctcccctggtcttttccttttctctttctgtttccctctttcctcctccttctcattccttttccctattcctcatcattccttttccctgttccttgtcattccttttccctgtcatttccctcttcccttcctcctcttactgcctctctcctgttctgtgtcctctcttctctttcctctcttctctttccttcctcccacttcttgtctcctcaccctcctcaccctttcccttcccctttccttctttctctttgttccttcttagtccttgatgtggagaggaaattcataatttcctgcctctccctgtttttcttgagccctgggaagagaagcgctgtatgccgacagcgagtgagctttctctgcctgcagtaattggatggcttcttggtactccgcactgtctgtctttggccgcagcattgagtctctgagctcctgggaaggggaagggaatagataaagccgcagggcacgtttttctctgggaaccacatgcaaatgcatgtgggatttgtcttacattggaggattcccacgtgtcgggaaagtgcttccctgacatgactaccgagtcactcctgatagtattcacccagaacttttaatgaccaattattgttgtagtacagatttaaaattgatgttaattggctggtgatatttcatatttaagacagccttaactctaaataccacttttcaccaattgccgcaaaaccgtttgctagcgtccttcctccagattaacctgatcaggagagaaaacagtctggagccacaacacacatcagatgtaggatgttcatgttgacgatgaggattgtatttattttttttttgctagaaagctgtttttctagtggagtgggtgagaaggagaaagggacctgttcagtctggctgtggtcttagggtttctgggcatggtgtggtcatttgcaccagtttctgtccttctgtgtttctgggttttcttttcttttttttttgagatggagtctcactctgttgtccaggctggagtgcggtggcacgatcttggctcactgcaacctccacctcccggattcaagtgattctcctgcctcagccttctgagtagctgggattacaggtgcctgccaccgtgcccagctaatttttgtatttttagtagagacggggttttgccctgttggttaggctggtctcgacctcctaacctcaagtgatccacccaccttggcctcccaaagtgctgggattacagatgtgagccacagcacctggccatgtttccaagttttcttcacatgcctggtgtcagttcccatcttgcagtttcctacacagtcagcccagaagtccccttctccatgaagctttctctccttgccaggagcggcagttatacatctgcctaaacctgtctgatgcctcccttgctagactgagtggaaagaaggggctgctggcttgtagtgggcagggccgggggtgctgctcaacatcctacagtgcacaggacatccctccacaacagagaatatcctatcccaaaatgtctacagcgccaccgttgagaaacccttgtctctagtcaacagtgtaagcattgtttagttccgatgtttctccctgtccttgtgcttgattctttgtaggcaggtttatgtgaggagctgcatcttggtccgagggctggtggtaggggttgaatctgtgcctgcccagatacttgtgtgacagcatcctctcaatgcagccatctcctcagcaggacccggcctgcccctgtaatgtgattcctgttcctatttaaggcagggctcctccaatggggacagtgtgggagacagctgaccacctcattcttctcatcaagacactcattccccattgacacttgcacgctcttggttgcgggaggaggaaatccagctcagattgacaggaaacagatgacattcattgacttgcctgatggaaaagaccaagggtacagcttgaattttaggggcttagtgtcatcagactcagcccccccccccatctttctgtcgatttgcgttgctctgtgttggctgtgttcacgcccaggctgtggtggcaggggtggtgggttgcagctccaggcctgcatcgtcttggaaatgtccatgctgcccccaggggaaaggcccctgtttcttctgaggctgacaacagtcctggaagtgactgtctttgactctcaatggtctaggccataccacgtgtctgctgaccccagtgcctgggtaggtgtgatactgggtcggtgtcgtgtacctactcctaaagccataggtcggtgggagaaagatgttttccccaaaagaaaatgagggtgctctgactagcagaagggagatggtgtttaactggccaaaatcagcccacgtccactgaagcctgcaggctgcccacagctcaggctcggcttagggccagtttggtgaaatatgtgcatctccacaccagggttttttaactgcagcacagctgacattttgggccaggtaattctgggttacaaggggtcccctgtgcattatgggatgttgaacagcctcctggcctctacccagcagcagccacatccactccctagttgtgacaagctaagatgtctccagcattgacacatgtcacctgggaggcaaaactgccttcttgcgaagtttcacattaatacttactgatgaatagacaactgaaatgaataaagaaatgaatgagttgatagcccattatttccaatatttcacagaatcgaagacaccgtcaagtgttagacccatcctgatttcagagatgtcacatgtgaagataatgcctgtctcagaatcagtaaaatcagggtgtttcatcttctcttccagaggcctgggaggtgagggtggtgggaagcccgtgggtctgctggaggaatcaaacctctgcagtgaggcacatcctggtgttggcaagtgtttgacatggattctcaagatggagtatggtgttgagtcgactgaaacccgagttcacacctgtatgtgctgtgaagtttcttaacatctctgcatgtcagtttctgtctccatacaaggagataatcatagcactgacctcacagagttgatataaggattaaatgagatgatagaggtaaagccacttagtaggactggcccctactgagtactcagtcaaggtgagatgagatgaagaggcagcctcagggaaatgatggacgcatgagtcaccaagctcatgcttcagggtgaacactgatagtctcgcccacaaggccccatgtccgccctgggggaagtgatgagcgagggaaggagggagccaccagcgctgctgagagcaccaccttcttgtctcctccgcagtttgacagcaagatgggaacacagatgagataatgcctgttagtcctgtgtactaggtgctatgcggggtactttttctgcgatacctcacttaatcctcatgccagcccgagacatgaggtggtcagtagctgcattttacagataaggaaactacggcacaggaaggttaagtgccttgcctaaggtcatagctgggaaataatagagctgggctttgcactctgatccacaatctttcgaaacccaaggtgttgaaaacacagactgagaagccaagccagcagccactgctttattcttcatgctaagagttagaagccaaaagtaatggaggctactcctaagagccaaggaggtggaaattcagagtaggctgctctgccctttaacaagtccagacaaagatttagccagggagagagtaaaaaccaaggtctcaaaggaggtttggagaccaaatggggcttcagttccccaggctctgccaggcccttgaccatgaatacttaaaagccagctgtgttgtaaacagtggaaatattcctagatctttcttgatttgatttcccttaacacatatagggtgttcaaggaaaacactggcctcttactctgtaactgcagccgtaactagaattttcctatcagagtgctgttagatttaaggaggtaaagaatggagagaacttgacgcaatgtctgacacatgggaagttcttaggaaacattatagctgctgccactgctgtcatcaaccatgatcaccattgtcatcattagttcccctcctccttcctcctcaatcagaagcatcaccatcattatcatcatcaccatcattaccagttatcatcatcatcaccaaccatcaccattattaaccatccatcaccatcactagccatgcatcaccatcaccagccatccatcaccatcaccagccgtccatcaccatcaccagccgtccatcaccatcaccagccgtccatcaccatcatcatccgtccatcatccatcaccatcatcaaccacccatcacaggcatcatctatccatcaccatcatcagccatccatccctttcatcgtcagccatccatagcatcatcacctatcatccatatcctcaccatcatcaaacattgtcatcaacagtatttcatcttctctctcctttcttagggaaactcatttaagaaagaggcagcatttttctccttaaaaacatacagctggcaggctgtctagacctaggtttgcagcttcctctgccactcaatggctgtgtgaccttgggaaggttattgcacctgttgggcctcaggttacccatctgcaaacagagatgaaaatacctcccctcatgaggtggcagagaggaatcagagctgtaatatgaaaggctcagtaaatagccatgcttcctgttaccacagcccttgtgtatctgtttcccctggtgtttttaattaatgcaaaattaggcggggtggggcagacttggtaacataactgttacttcgacagtctagcaagtaacttcttccaaatcccctgctgcaaaaagcagcttgtttccctctcagcttcttctggcaagtgagatgcttgaactttgcttccctcctcgtcttccctgggctccttgtcccaacacccacctcctgttgtctgggccaagtcagtccagcagcagagttgagattcctcgtcccatctccactgtcccatgctctcaaggttataataccatcctcagggacttcctgagaacccaatcagcaaactacactttcacacacctctctctcccagcccctgagaagaggcctccacatggccgccagctcagctgcttccttcagcccccgacagagcagtctgacaatttcacttttgtgaagcctggcatggagctgggattcacagtctctcaggatgaggctgctggtggtgtacggagataggctttaaaggttggactggaaatgcatttctgtatctggaacaggtaggaaagaaacatccgaagcttaaaggaacagccccaccctgtctacttcattataagactcaggcttctcaaagcccagctcaggaagaaacaaacacacacacaaaaacccagcctcatagtgtcatgcagcagttgaggtgaatacgaggtgataccaagccttcatgctacaggcacaatgcaagttccaaagatggaccctcggctcgctaaagccaggagaagcatttactcaccaatgcatggggttgttttttttttttaaacacagaaataaaatgcttattattcccatgccgcaggccctgggaaaacattcatcacataaacgtagatcataagagctgatgactgaacagctgcctgatggctcacagaccgtctctacccactgcctcccgtcaacctcaggatgaacatcgggcatgagcaatggcatcacttccagatgaggaagctgcagccggcatcactcagctcagagcctcccctccagctcagggctttggggctcaggcaaaccctacgagcacagagggacaggcagataactgtatccaaatgtgaaacctttggaacgaaggctggggtaacaggtgccaagtgcatttgggacatgcttttttttcttcttcttcttctcgagatggagtctggctctgtcgcccaggctggagtgcagtggcgccatcttggctcactgcaaactctgcctcccgtgttcaaaccattctcctgtctcagcctcccgaatagctggggttacaggcgcgcaccaccaagcctggctaagtttttgtatttttaatagagatggggtttcgctatgttggccaggctggtcttgaattcctgacctgaagtgatccaccagcctcagcttcccaaagtgttgggattacaggcgtgagctaccgtgcccagcctacaagtttttgtaagaagagtgcatgtcagggcctgtggccaaaaggtgatactgttgaggtggacaaggggcctggtgtcggggatagtcctgtttctcaccagagagtgtgaggtccatgaagtgaagttctaagcatattctgagctggttggccagagggaatcagggctactggcagccttagctttgcacatgtctacgttagagcctcagaggcgtgatcagaaagatttagttttaagaggatgactttgtacttttcagatttcagaagccaatttctcttcccaggtagcagtgcagcgactttctcttgtcgatctctatcacgggtaaaatgaagagcccttcaagagcagagtgtgggtctgtctagggtgtggccattgcccaaggccagagtctttgaccaggaggccccatggtcagtttctgttcttttccttgcataagagttttgattttgctgtttcttttctcttccactgcatactttatatggaaaattgaagagataattgaatagggaggttttatctcttgaatgtgctaatatcatggagatgataatattctgtcttagggcccttccttgggcgactagaaccatggtaagcaacctgctttgagagagctggagactgctggtacctgcaaattattactaattacatctaaaaatctttattagcagtaagaggcagaaatagcttcagagcctaggggcttaattaaatgtgaaatatgcaggagagaagtagcttatgaagcaagcaggaatcaggctattatttattttgattgttgaaatagaccttgttgttccgagtggagttctatctggggggatacctgtaacagacagtatcttctcctccgtctctcccctctctataccttccttccctcagttattatggatcagacactgtgttaaggattaggttatagtaatgagagagtagactagcttcttgtcatcatggaattacagtctgtagtgaggagaaaattaatactaatcaaccacatcaataaatggaggataaccctaacatgcccgtccatagacaaatggataaataaattggggtacattcacacagtggaaccttgggctgcaaggagattaaagatgtgtaactacaggcaacagtatggctggatctcataaacaatgttgagtgaaagaaactaggtacaaaaagatacaaacaaaacacacccaggtgattgcattaatctaaacgcaaaagcgggtgagaccgatctgtgctcttggaggttgtcctctgggggtatggtgcagctcggctgatgtgggtcacttaggttttcagtgctcagggtgaaagtgaggggtcaggagagagcagaaagctggatcaccccgcacatgctaagaaaccaggatggcaacgtggatgtggcgggttaagcaaattgaaactgtggataatcattagctcaacagatgccataagatcagagtgcccctgaggcctctggtctctggatgatgcccatgtatttatcacttagtcaccggagcacagatcttagaaggaggcccaggagccctggctgcacacgtaattccattgcacgctgattcagtttggtcaagtccacactacccaaatgaccagagttaaaaaaaaaaaaaaataaaaaaaataaaaagagggaatagaaaacagaggcagggtgggaagtagagaagaggcagatagagacaaggggaaaaaaatccaacacggatggacagacgtatctggtttaaatcccagggcagcctgggccagttctactcaaatagagtgtgtcctggagtttgcacagatgatttgggcggccagggtctgctcttccccagccaggaattcatttctgaattcctctcggaattcctctcctattgtgagcatcttgtgctgagagctacatgttttttcatgctgcttttttctacccttgggcactgttgacagaaataaccatttctgctgtacccacaaaacttggtgtgttttctgcagggctaacctggactctcttgcaggcagacagaaccatcacccagccacagcctgccaagaccttcagggataggccttgggcattggccagagaccttttaaaattattttataggagtactaaaggcttactgggacaaaaaaaatatttggttttttagttatcttattttttttttttaaaaagatacagtactgttttaatactttggtatatcaggtagcttgggctaagttatactgttgtgacaaacagtcctcaaaccttggcagcttacaacagtaagtttattattcatctgtttcccactcatgccacacatccatcatgggtcagctgtggcctgtgctcacgctgtctctatgccaggatccaggaagaagcaacagcctttagccggggcttgcagctctcctggcaggggggtaagagacagtggcaggccttgctctgatcctgaaagcttctgctcagaagtgacacgtcactccctcaaaacacatggtcaggcctgaagataatgagccggaaagtataatcctctcacagggaggagccctgcaggagggtaatgggaacatctggtagaatagaaatataatgtgccttcacaagtaatactcactatagaaaaccccaggaaggatagatatgtgttacgtagccaataaaaatggtgatgtagatctaatttttaaaattctttttaaggtgaattttatggtatgtgaattgtatctcaatttttaaaaattatttatttttttgagacagaatctcactctgtcgcccaggctggagtgcagtggcgcgatctcagctcactgcagcctctgcctcccgggttcaagcgattcttgtgccttggctacctatgtagctgggattacaggtgcatgctaccatgcccagctaatttttgtatttttagtagagatggggttttgccatgttgaccaggctggtcttgaacttgtgacctcaagtgatccacctgcctcggcctcccaaagtgctgggattacagggcccgagccaccatgcctggccagtattgtagatctaatatgtcagcttggaaagctatttattatatatgccagaatgggggagggagaagcaggtaacaaaagagaatggatagtttaggctcatttttaaaaattataattaaaatgtatatattagcataggaaaagacatggaaagatctaggccagatgtagcaccccttggggtctgcagagcctagctgggaaatgactcaaggtggtttcttctcggtgccaaccctctgtcaccatgcagggtttcagactctgtgttccctcatcttccaggtttgtttgtcgttgctgttgtttttttttgtgatgaaaatcttgatttcaatgttaaaacctcttatttttaaatgttggcaaccaattagatgttttaacctgcgtgaattaccagtttgccacctctgataggaaccaacaatggctttctctgggtagtgagattttgtatgttttgtttttcttttttttatttatctgtattttctcagtttaccttgaagccaggtatttccttttgacaaatagtaattggggaactgataaaagaaaaaaaatactttaggtataggaattgctcttgactttgtaattctctattcggttgttggtatttaatcaaacaacagtgacccaaagcatcggccatgcttggaggttaataaaacggccagagacaatgcctgtgccaggacaggctgaaccccaagaggaagtcacagtgggaagagggtgcagagcgcccttgatgtcttgctgaccttgaacatcaggattctctatgttggcttctgttgacacagagccctgatgtgtcttcttgaaaatgaccccatgactgggaagatgccagctgacttggtgggagaaaggagaaaccttctgagggcaagttcccagagcagttgctaaataagatcagacaaagcacttaaactccaatttagcagttacccgaagcacagctccctgcagcagcttcatttgccaaatgtgccttttgcctttaaagacacaggagattgcatgaagcagagaaagataatttgttggatataaatgtgaatgtaagagtaggccttagattcaatacacactgttgaatattcagggttttattttattttatttttcccccaactgtaattccctgcctcatcacccatcatgcaaatgtgattcttagacattttctaatgttactctttccctaaacaagtaatcaaaacagggctttaagctgcatttggactgcaaataagtttagtataaaatgtaattattctccttaaaaaatcaacagagacaatttggacattggaatggcttgaattatccttaaacagaactcagggtggtgtccattccaaagattaaaataaggtaagaccagtcttagctggtagtagccagtttcttaaaaaataaataaataaataactttaaaaaatgctaaaagtagtacatcttctttatagaaaattcagaaaataaagttagaaagaaggaaaacaaaggactcacatagatacagttgcaattaatatctccttctagttaatcccaccacacagatatgattgcaattaatatctcctcctagttagtcccaatacatagatatttgattgcaatttatatctcctagttaatcccaatacatagatatttgattgcaattaatatctccttctagttagtcccaccacacagatacgattgcaattaatatctctttctagttaatcacaccacatagatactattgcaattaatatctcctcctagttagcccaatacatagatacgatggcaattattattatctccttctagttaattccaacacataatatatgagtgcaattaatatttccttctagttagtctcaccacacagatacgattgcaattaatatctcctagttaatcccaacacacagatacgattgcaactaatatctcctagttaattacaacacacagatacgattgcgattaatagttctttctagttagtcccaacacatagatacgattgcaattaatatctcctagttaatcccaacacacagatacgattgcaactaatatctcctagttaattacaacacacagatacgattgcgattaatagctctttctagttagtcccaacacatagatacgattgcaattaatatctcttcctagttagtcccaccacacagatatgattgcaagtaatatctccttctagttagtaacaacacacagatatgattacaattaatatctccttctagttagtcccaccacacagacacaactgaaattaatatctccttgtagttaatcccaacacatagatacgattgcagttgatatctccttctagcttttcttctgtgcatttttttctttagttggaatcgtgtcacatgtaaacgtctgtgttctgcttttctttttcctctaagagacagtgtctcattctgtcacccagactggagtgcaatgacaagatcatagctcactgaagcctcaaatgcttgggcttaagctgcccaaagccctgggattacagatgtgagccactgtacttggccctgcatctgctttttaatttaacgtgagatttttctcatgttactctacactttacaccaaaaccatctcttgcggtgcacagtgttccaccatcacgctgtcatatcatttctctgattgttccttttgctcaacatttaagtttttttctaatttctccttgtcaaacagttgtagggaaccatgttgctcttcaggcttgttttgtatgttacattcttttcctgaataggtttgtggttagaggagccggtagcagtgtgctgtcttagaaagggcatggacttttgtagtagatggatacagattgcaatcttgactattgttttcttgctctctgaccacaggcagcttactgaactgctgtgctttattcaagggtcctaaactggtattgggctgttgcctgttaggaaccgggccacacagcaggaggtgagccgtgggccagcaagcattactgcctgagctccgcctcctgtcagatcagcagtggcatcagattctcataggggcacaaaccccattgtgaactgtgcatacaagggatctaggtttcatgctccttatgagaatctaatgcccaaagatctgaggggaaccctcagttcatccccaaaccatcagttccccccccagccccagtccatggaaaaattgtcttccacgaaattggtccctggtgccaaaatggttgggaactgctgctttattttctttgtctgcacagtgggggcaatgccacccaacttggagggtggttgtgaagtgaaggataatgactgtgaggttcccggccttgtgggggacacttacatcagttgctgtgttttcttctccaagaacagacctgaggggcagtgaccttgggatcaggcacacctgctttggaattggtcattcctgagtttgcatcccagctctgccctcagagatctatagccttgggcaagttaacattcctaacctcagtttattcatttgtaaaatgagcatagtgcatcaaagcttataaagtagttattaggatcaaatgaaattaataaagtgttattacttgtaaagcacttatatagtcccagtaatatagctcattctgaatacatgacaggctttattgttatgactgttactattacttttgttgtcctcattgttcttatccatgctggaagcgggctgtagagaagctgcggtgggagaataaagagagacaccttagtccacttgtaagtggtgacagtcataaaagcttccaggagggggtgattcttgacgcagtcttttttttttttttttgagatggaatctcactctgtcgtgcccaggctggagtgcagtggcacaatctctgctcactgcaacctctgcctcctgggttcaaatgattctcctgcctcagcctcccgagtagcagggattagaggcacctgccaccacacccggctatttttgtatttttagtagagacggagtttcaccgtgttggtcaggctggtctcgaactcctgatctcaggtgatccacccacctcggcctcccaaagtgctgggattacaggcgtgagccactgcgcctggcctgaagcagtcttaaatgtggagttgggagtgagtggggtgggggccctgtgagctctcccaggccccaagacgagatgtctgggcaaagggggaagaggggaagagcgggcaggtaggagaaatggccccctgctgtgaaggtcgaaacagtgcagatcctgagaacatccctccaattaacagccccaggggtctgtgaggaggagagtattagatttattatattgtgatgtcttttgctttttcatttaggggcttgagcttttcttcttcttcttcttctttttttttttttgtttttgtttttttgttttttttgcattgaagttattgatccacagtgtacgaatgatgctctcctgctctgtggtctaatgaaaaaagtcagctctgatagaacacatcaaaaagtgaaataaactcattcccttaaaaaaaaaagttgaccttttgcaaaaagtgtcagaaaatgggtccatctgtgttacgtaaagtgtgagttttctctctgagttgaatgaagtcaggaaatgatcatgaagaaaacttctgcttcagagtgtcaagaattgaggggtgttgctcttggtcacagcatcttctgagctgttacctaaacccacagccggtgctgtgaggtcgggtaatgctcacgacatagctttagctcacaagctgctttctgaagtcttgttccttcattcatttgttctttcattcattctttctttcagctaaccaggcaaccagtgaacccacgaacaaagacttacggggaaccttctgtgcaggcctcttctgtgccctggggatatactcaggaggccagagagataagatggctgctcccaaggagtgcaggcttaataaacagttcagcaaatagcactttacttttattcagcaatgagtgctgggaaggaaataagacctggtgatggtggaggggacgaggacacaggggtggaggctgctttatcttgggtcattgggaaggcctttcttcatttttcttcattgattggggcaggaatagtccttgggctttttggcagcccagactgaacagatcggtcctccgcatttacgcattcgccaattaccgttagtcatggctgtttgtatatcttgtattctaagacttgaccctggttctccagaaaccttgtggtgtggtggaggaaacagatgcatttttggggtccaggctgtcactgtaaatattcatgatgagtaaggggcacacaccaggactgtagaagtccagggtttgggcacttagcccaggctggtatggggagtgctcaggaagacacatcttctggagaaaaggtggcctgggctggtggcaggaggatcaggcagagaaggctgggcagggcatcctaagaagggggatggcaggaagcagagccagggaacagcacgctatgtataagagcagcaacgccacacacgtgccgcgcgtcacctcctgtaggcccaggggcagaccctgccttaactgtgatgtccgagtacagggctgtctaggtccatgccttcacttgacagtgacaggagcttggctagtttatgtgggagggaaaaaaagttgacgagaggagaggcgctcattctgctagaattcaatggcagctcacagaatgaagtgtaggggtgagaggctgggtcttgcagccggggagcagggctccccactatgcaactgccaggggcagaagactttctccccatgtgttgactgtgcattggttttagggaagggctttggtggaccggacctggtgcatggggtagtgtgatgccgggcctgggccatggcatgggggtgagggtgtgggtagaggtgggttctgtggcagagccactaggaatatgcagaatgtggagcgggttcctgagtggaaggagccccagggaaacaaaaccaatcacatgcttctgaaaagttgtgtgtgtcccgttcctttcagaccctgtggaggtccactcccaccacgagtcattacatttgtctacatcttggttagccacagttctgggcagcttttgtcaccttgaaaacagagaaaagaaatgtcttgaggggagataatgtcgatgtaacgagccttcttcctctgccttaacgtccactgattggaacaccccatttagaaactcggctcacaggatcataaaactgtaacgattggccgggcgcagtggctcacacttgtcagcccagcactttgggaggctgaggtgggtggaccacctgaggtcaggagtttgagaccagcctggccagtatggtgaaaccccgtctctactaaaaatagaacaattagcctggcgtggtggcatatgcctgtagtcccagctactaaagaggctgaggcagaagaatcgcttgaacccgggaggtggaggttgcagtgagccgagatcatgccactgcactccagcctgggcaacagagcaagactgcgtctcaaaaaaaaaaaaaaaaaaaaggaaacttagctgggcgtggtgggcgtggtgggcatggtggtgcgtgcctgtaatcccaggtacttcggaggctgagacacaagtatcgcttgaacctggggggcggaggttgcagtgagctgagattgtgccactgcactccagcccaggcgacagagtgagaccatgtctcaaaacaaaacaaaaacccagaaaactaatgatcaaaggccctattcagctttctctggacccattccagttcatagctgttttcattcctgatgcttatgccagtgcttaagggtcagtctcctctgcttaacttgctggccagagtatctgtcccctgccccctgttttgaggtcctcacatggggcatccttcttaaaacctcccatgcttgttctcttgcccagacctagatcaaggttgatgggcaagtttactgggtggtgtttatttcatgccatttgacatgctggggtggagagtttggactatggattgaaacatgcttctgcctggcctcaggcaacttaattgacctttctgggcctcagtttccttctctgtgaaatggggataatattataacaggaacaaatcggtaagataatactcattattgaccagagtgtgtacaaagtagtaagctctcagtggctgtttttgtttctctgtttgcctgaaataggaagtagctgatctgtgagctctaagatcagaaacctgggccctggggacaggcctgtaccctgaaaactgcaaagcagggtgtttggtggggtgggaggcagcagaagggggagcagggcgagggagccgatgttcatccattttttgtgtgtcctgtctcagagccagagtgatatgcctggaagtgctagtcgggggtaatatgtatctaaaccactgttttctaaactgtgtcctgaaacagccttgtgtaccctgcaacccccaaagcagggccttcccataacccacccaaagacagttcctccaagtgctagggacccgccaacacccctgcacaacggctgggggctttcttaacttcctgcatctgacaccgaaggccctgctgacctcatccaggacagtacaggtcagacaggcctttgctccagtcccatgagcacactgatgttaacctgtaaggaaaggctagaacggggggatgccaggcctgacatctagcatgggaagtccctccatgctgccactttgtaacagacgttacagacgtctgttacaaagtataaattcagccttctggggtcccagagaaaagggaactggcacttggtgtctttggtgtcagtcctgttatggggggcggtggggggggtttggtcatctcttcatggggaagaggctgtgatctgtgaccaggtcatataccaggagcttgaccttgggccagtctgtccatccccaggcccaggagagggttggagggatcacatcactttgccatttgcagctgttcttcagttgcagagaatgtgtgcaccctgctgccctctgcctctccgtctttcttcctctgtctcctcccgtttccctctattcctcccatcccaagaaatcagcacaagcatcagctgataggacccatctggtcttagccagtattgagaataaaggcattttgcagggacacacttctgccttacaactgtttcttaaaattctgaagtgttctctagatcagaaaaagatcccatttattaaactgatgaccagcgaggagacggtcaggtagtttagttgaagggagcagctcctccttagggcacctaagactcaggccacaggcaggcgggtacgaggctctgagaacctgccctgcttgaggggtcctgggcatggctttggctacttccatttttatgaatccttctagacatctcttgggacatagctgtttcaggacacagtctagaaaacaccagaggacgcagtttagaaaacaccagtttagatatgtatttcctccttgatgagcatagttctcagcagctgcatccagtagcccagtctgggtcctcagccttgtggggttcttttgctttgctcctagaaggccccagctggaatgttgttacccatgatcctgggtctccttgcagcagagccagccactccatggtgaggatgcactttgttggttcccctggcttctgggccttgggcaggttgaaatggcaggtgtagtcccagctgggcagggcatcctgagagaggggatggcaggaagcagagctagggagcagcacgctatctgtgggaacagcgacgccacacacgtgccgcgcgttacttcccgtaggcccagggtctgggccttggggttggattttgggtctgccttgctcctggggcagctgctaggatcaaatgttgtgggggcgggtgtcaatggcactcaattggggcgccgcacacaccgtgagttttatgttggtgatgcagacgtagctgaaggttgattttccaaaggggattaaagctcttttcctggcgatgcccgagacccctgctatgctctgctgcagcccccggaacagtattggcacaggtgagggccacgcctcctccctgggcccaggcatcaggcgctggctctccacaggaggccgcagcttaaggagctcacagacgtttctattcggagagaggggaaggaacgaagacaggaacacagcaccgtttttagtaccaggagacagcgacagcttggcgtcagtgcgatgcgtgacatttccgtgtgtaaggtgtgctgctgcctggtggagtggcgcgcgagcacctggctgctttcctccctgccagatgccatttcaggaaatcgcctttgttgctcaggcattcatacccctgactgctcaggcgcagcctggcttgggattcaggagggctgaggggcctctctgagctcccctggtgcctggaaggactcttcagggtcctagcccctggcctgccatgagggccatcatctttaggcactttctgaccgggggactttggctgtgtccttttgagacacagtgttgccctgtggcccaggctggagtacagtggctcactgcaacctccgcctcccgggttcaagcaattgtactgcctcagcctccctagtagctgggattacaggtgcctgccaccatgcccggctaatttttgtattttagtagagatggggttttgccatagtggctaggctggtttcgaactactggcctcaagtggtctgcctgcctcggcctcccaaagtgctgggattacaggcatgagccaccacgcccggcctctttccttgtctttgaacttgaggtatcgctagggtatttccagtgtcccagtccaggcctgacatctctgaatacatgaaaggaaagtagcaaacctgagattctgaaagacagtttgtgttccagcttagaatgagagacagagaaagcaacagcgtgtgcataaagaatcatgggggtttaaaactgttactgaaatcctgtaatttttcagggtagcccaaatgaatgtggtatgtttctttctctttgcttttcctcctatttttcatgctttctctctcactttgcttttcttcctttcttggtctgtttcttttctctttctctctttcacctgagtcctggcaaggtgtcacacactgtgctctcagctcaggatggagtggatgggcctgaggccctgcccaccgcattccctgtctcatagcggggagagtcaggttcagatggctgtgaggcaatgggtcagggggtagtgtgagaggagggttgcctgtgccaggcatgggagatggtggcctttgcggaggacaggtgacatctgaactgagtctcaggacatacatatgaagtacatcaaggggcagaatggggctggcaggtagacaacatctctgtctccccgaattgctggttagctgttctgagtcctttcccctcttgaccctggctccttccccacccatagctgccctctcctccttcatagccccaggacccagagtccctgggaggggtcaggagcacaccggcacccagatttatctccaccatcttccccttgttgcttcaggtgaaatctcaaaaatgcacgctggctgctggcacttaatgtctttttcggctgcaccatcagtgaagcagggctggccttccaaaccactctggggggtgcccttccccccagcccagggccactgcctggcatcttcatgctgggcttgctgcagctgcccacagcccagggccccagcggtccatctgcactgccaggcccagctctgcctggtgtgggctcctcaccccatgtggcacagatgcagaaccttggacttggacttgggagcacacgtccactcttggccaggggctgctggcttactgagagtttcctgttgacctttccaagcagcctcagagattcacctcttggcctagcttgggcaggagtggggaggtgagggggcaggagtaggggggcatctctggactatctttattctgacctacttgatgcatcaggtgacttgaaggcagccaccagtcccatgaggccaggcaggcagttcactgcaggcgtcccagccccacctggtttctagccaaggcatcagccctccttgggaaactttgacctaatttgagagctcagctgggttcagcgctctcccctctccctttattttctttctgctggtgtccttctcctttcccccttaccacccagtttacctctccccttcttcatttacccgctcactccagcccaggacccctttactctggcagaccctgtcttttcagtgatcatttgatctcaacctctgtccaagcaggaaaaggtagcagcctagatttggacattcttttaacacagaccagcattgaggctgcgccttgctgggtgccaggtagaggcagtgaggctgcctggtctgtggtggcaaggatagccagactcacagactttcagaacttcagctcagaggtaagagcttgttgttgaagaaatgaccataatcatgaatgaacagtcagaaagcccagggacttttgagcacattaaaatcagaagaggtcacatttgaactgagatctgatgactgagttggagctaaccaggtgtaggggtggaaggaacgttctagactcagggaaggttctgggctgagggcctgggatggacaggagccgggcctgttggaagaactggaagatctacctggctgcagagagggaaacacagcagggaagggggagaatgatgtaaggtgagggtagagaggaaggcaccggacaggattgtccacctgccatgtagaccattgtcttccatcgtggttgcacatggcagcccgggcttccaaggcagggctcagagcacgtgagaaggaaggcttcccttccccagcctccctcatcagtgaagccagtctttcccagaggccctccacctgctcttgtcctggttgcaggggcacctgagaaagtgtcatttgccagccttgcaatgggaagcagcctctgtaggcagggaagagagctgagagacggctagtgggccagcagctgcatgtctaccatgacctggtgacaagatagtgacacctaagagccactggaagtcaccagagaggccagcggggagtagtgggtcctgattttccggtgtggagtcagggcttggcttctgagttagccactatattagtttgtttttacacttgtgataaagacataccagagaccgggcaatttacaaaagaggttgaatggactcacagttcccatgactggggaggcctcacaatcatggcggaaggtgaaagtcccatctcacatggtggcagacaagagaatgagagccaagcgaaaggggtttcccctcataaaagcatcagatctcgtgagactcattcactaccacgagaacagtataggggaaattacccccatgattcagttatttcccactgggtccctcccacaacatgaaggagttatggcagctacaattcaagatgagattggggtggggacacagctaaaccataccagtcacatactagccatgtgaccttggtacacttactttgcctctctgagactcagtttcccacttttctgctagggcagtagtacaccttcacccctgcagtgggggaagagcactaacatgcttggtgcagggtgggtgctccccagatgccaagtggtattttcctggctctccctgagtatctggtggggttcagctggctggccaaaccgtccagctggtgtgtgggtgcaggggacgtggggatgcagcccaactctgcctcctggaattgcgtggccttgggccagcctcgcctcttagagtctcatgtataaaatgggaatgtcacccaccccaccggattgactcgagactgaaagaagctgtgctcgcaaagggcataaattggaacacggcccagagcaggagtcagcacctgtcacatcctccctccccttgccttgagcttcagccttctctctttctcctgtccttaaaaacaaaagaaaagagatattcacaaaccataaaactcaccttttcaaagtgtacgattcagtcactttttaggatattcacaagattacgcaaccatcaccactctaattccagaaggttttcatcaccctggagaaactctgtggctgttagcaggcagtctccatcacccccacaacccttcccctcctagcccttggaagccagtaatcgactttcttttcttttttaagttttatttgaagttcaggagtacaagtgcaggtttgttacgtaggtgaacttgtgccatgggggttagctgtacacattatttcttcactcaggtattaagccgagtcctcattagttatttttcctgatcctctccctcctcccaccctccacccaccagaaggccccagtgtgtggtgtttccctctgtgtcacgtgttctcatcctttagctcccacttctaagtgagaacatgcaatacttgattttctgtttctgtgttagtttgataaggataatggcctctacccccatccatgtccctgcaaaggacatgatctcgttctgtttttggctgcatagtattccatggtgtatatgtaccacgttttctttaaccagcgtatcatcgatgggcattgaggtggattccacgtctttgctattgtgaatagtactgcagtgaatatgtgctaagcatgtgtctttataatagaatgatttatatttttctctgcagatttttctctagatctgccttttgtgacttagaatcgtagaaatcatacaatacgtggccttctatgcttggcttctttcacttagcgtaatatcctcaagtttcatctgtgttgtagcatgcatcgctacttcattccttttttttttttttttttttgtgatggagtttctgtcgcccaggctagagtgcagtggcgctatctcggctcactgcaagctccgcctcctgggttcccgccattctcctgactcagcctcccgagtagttgggactacaggcgcctgccactgcacccggctgatttttttttatttttggtagagacggggtttcactgtgttagtcaggatggtaccaatctcctgaccttgtgatccacccacctcggcctcccaaagtgctgggattacatgtgtgagccaccacgcctggcctacttcattccttttaatggctgaataatatttcattgtttgggtagatcacatttttcttatccattcatctcctgatggccatttgggttgttccccatttatggctgttacgaattatgtagctatgaacattcctatactagtctctgtgtgaacgtttgtcttcagttctcccgttttgtggttgtccttccattttgatagtgtcctttgaagcacaaaagtttttaatgtcggtaaagtccaatttatctgttttttcttttgttgcttgtgcttctgatatcatgtctaagaatcctttgcctacttgaggacacacagatttagccctgtgttttcttctgagagttttatagtttcaactcttaaatttagttatttgatccattttgacttttgttttgttttgttttgagttagattctcactctgtcacccaggctggcgtgcagtggcgtgatctcagatccctgcaacctccgcctcctggattcaggctattctcctgtctcagcctcccaagtagctggaattaaagacacctgccattatgcctggctaatttttgtagagatggggcttcaccttgttggccaggctggtcttgaactcctgacctcaggtgatctggccacctcagcctcccaaagtgctgggattacaggtgtgagccaccacgcctggctttgacttaatttttatatatggtatgaggtaaggatccagcttcattttattgtggatacccagttgtcccagcacagtttgtttaaaaaaaaaactgttctttcctcactgaatgatcttggcactcttgtcaaaaacaagttgactatagatgaatgggtttgtttctggactcttgactctgtcccttgcatctctatgcctgtccttctgacagtgtcactcagtcttgattactctggcttattaggacgtcttggaatcaggaagtgtctattcactctcctaaccctgtttcttcttttctctcttcttcccttctctccttttatcttttgtgcaatctttagggcaagagattacaagtgtttgttgtaaagggccagatagtaaatattttatgtctttgtaggccgtgcagcctccatctcagatgcaactctgttcttacagagtcaaggcagccataggctatatgtaatgaatggatgtgactgtgtgtttttttgtttttttttttttgatatagggtctcaggctgtcacccagacccaggctggagcgcagtggcacaatcatggctcagtgtagctgctaccacctggactcaagtgatcctcccacctcaacctctcgagtagctgggactataggcacttgacaccacacctggctaattttttctttattatttgcagagacaaggtctcactatgttgcccaggctggtctccaactcctgggctcaagccgtcctcccatctcagcctcacaagtcctgggattttaggtgtcagccaccatacctggctgtgttcaaaaaaaacttttttttctggtttgacactgaactttgaatttcatatactttgcccatgctaaagaatactacttttcttttgatttttttccagctatttaaaaatgtgaaaatcattcttagtctgtgggccgtatgaaaacagccagcaggccaggcgtccagcctggtttgagaggagtgcgtctggagggaacagtgtgtcagaggaagatggagcatctgcctaaatcctgccgggcctagggcctgcgtgggctttctctgtcatgctccttcctatggaagctgctcagtagatcctgctggggacatggcattgcggcactgagacatcagagcagggtcacctgtgtgctactagaggggcccacgctgttcctccctgactactctaccaacccctggccaaggcagcagagagagtctttgcgcagatactctgataaatcaaactacaatggatgccagccacatgttttaccttttcttctggaaaaacacacaatcctcactgcaccccaaaacatcagctctaaatctttctaagaggagcatggctttttttttgagatagggtcttgctctgtcgcccaggcaggagtgcagtggtgctatcttggttcactacaatctctgcctccccttcaagcgattctcctgcctcagcctcccaattagctggaactacagacatggaccgccatgactggctaacttttgtgttttcattagagacaggttttcactatgttgaccaggctggtctcaaactcccgacctcagataatctacctgccttggcctcccaaagtgctggaattccaggcatgagccaccgcacccggccaagcacgacttttaaagccagtccaaactctgccggatggctgtcatgtgtgactttggtctagtaagttagtctgtctgagcctcagtttcttcacttgcaaaaagggtatgggatgagtgagtaccttcttcactggggaatgtgagcattcgaaacttgcatagcacctagcatgtaataagcactcagtatagcatctagcacgtaataagcactcagtatagcacctagcatgtagtaaacactcagtatagcacctagcacgtagtaagcactcagtatagcacctagcacgtagtaagcactcagtataagacctagcacatactaagcactcagtatagcacctagcacgtagtaagcactcagtatagcacctagcacgtagtaagcactcagtatagcacctagcatgtaataagcactcaatatagcacctaggacatagtaagcactcagtatagcccctagcatgtggtaagcactcaatatagcaccgagcacgtagtaagcactcagtatagcacctagcatgtagtaagcactcagtatagcacctagcatgtagtaagcactcagtcaaagctatttgctgctgtgctgctgtttcttcccactgcatcccttattgcactggatgctgagggagatgcaggtggctgcttccagcccatggtggttccctgagcctgcagcctcatctgcagcataggaatagacacagatactcaagtactggccccagatcctggtacatagtagatgttgacttttcttctttgcctgagctggattaggtgggtgtagggggaattcttgttccataccagagtaagcatttgtggcctgtttctggcacaggtacctgagtcattttcctggactttttgaacaagggagagcgtttttctccatggcctccaagcctcactccccaggctacaggtccttccctctgtctcttccttgtaggccccaccccatttacaggtcatattcatcacatctccagaaccccttcctctagatcaggggtgagcaaactgtggcttgtgggccacattgtcccctcgacagtgtttttttttgtttttttttttttttgagacagagtctcactctgacagagtctcagtcatccaggctggagtgcagtggcacgacctcagctcactgcaacccctgcctcctgagttcaaggggttctcctgcgtcagcctcccaagtagctggactatagacatctgccaccacgcccagctaattttggtatttttagtagagatggggtttcaccatgttggccaggctgatcttgaactcctgacctgaagtgatctacccacctcggcctctcaaagtgctgggattatagaagtgagccactgtgcctggctgacagtttttttttgtttttgaataaagttttattgtagtgcagccatgtccattcattaatttaatgtctgtggctgcttttatacaacaaagacaaaggtgagtctttaggacagagcccgtattatccacaaagcctaaaacatttatcatctggctggctgcagaagacgtttgctgaggccttatcgagatgcccccgcttcagggctcctgtatgctgagccgtcctccattctacgctgttcattctgtacactgagcaactctcctgtgtgcatctccccaggaggctggggctccctgagggtagggctctctcatcctaggtgcccaccttgctcacaacacaggcacatagtaggtgctcaatacctatgaagtgatagatgactggctggctgaatgaatgaaagaatgaaataaacatgaaatagtaaatcaagatggagttcttcccaggtccacctaagctaagctttttcacttacaaaaaaatagcctcagtgtacagtgggttcagaacttctctttctgcagcccatcagcttcctctccaacctcacaagtaggtgtcaccagtaaaaatggctgacactcagcatggcgtctactgtatgccaggccctggattgagtgctttacagatattaaccaattcaagcctcgggacaacgctaggaagaaactcctgctgctgcccccattctacagatgaggaaatcgaacacctgagaggctaagccacttccccaaggacactaagctagtaaatgtgtgtgaaaagggagtgcattcaaacccaagaggtggagctcccgagtccacgctttcgcgctgcacacctgcttccatgcagctcctggacgtgcagttgaaacagtagcttctcattcttttttttttttttttttttttttttgagacagagccttgctgtgttgcccagcctggagtgcagcggtgcaatctcggctcactgcagcctccacctcttgggctcaagcagttgttcagcttctgcctcctgagtagctgggactagagtcgtgcaccaccatgcccggctaatttttgtatttttagtagagacggggtttcaccatgttggccaggctggtctcgaactcctgacctcaagtgatccacccgccttggcctcccaaagtgctgggattacaggcgtgagccactgtgcctggccccatttgtttttgagacaaggaaactcctttcagagtctctgcctagaatcttaaaagctcagcagagtcattaattgttctttatcatctggtgggatatttaatgtagtaactgcctctaattgagtgggtaattcaggattgatctagcactccaagagggacccactgtgtgctcaatgaatagagaggagtcagaggagcttatcaagaacattgctcagaataggagccagtatcgatgttttagttggaaagagttggccctgtggaggggattccttgcagagtttcatggcagtggagctcctgttgactttcctctgtgccttgttaggtatactcaacacttaacatggatgaggattaaatgatttaacctataggaaacacttagaatcggctccagtatgtactaagctctcaatatgaaatggccgttattcacctgttttattaactggatcccaacgagctgcctcatgttctttattttctaagggcaggattgacatatgtaaaataggagccaggtgtggtgactcacatggtaatcccagaactttgggaggtcaaggtgggcggatcatttgaggtcaggggttcaagaccagcctgaccaacatggtgagaccccgtctctactataatataaaaaaaattagcagggtgtggtggcacgcatctgtagtcccagctacttgggaggctgaggcagcagaatcacttgaagttgggaggtggaggttgcagtgagccgagatggtgccactgcactccagcctggcgacagagggagactctgtctcaaaaaaaaaaaaaaaaaaaaaaaaaaaaaaaagtaaaataaatgctacagaccagcaccatttcttaaatacaaactttgattctgaaagcatccaggcaattgaagaagtcccatcggcttagcatgagctttgggcacctttctgtcttacctttttctgcagatggacaaaagtatacatgatggatttttgttgttagcggaattctaaaaatcaaaactaaaaactatcctggtgtccagcctaatcctggatacccccaaagattctcaatcagtactttctggatcaattttcacctttctaaacctcatttttaatctgtaataacaaaagtccagagaaaccacccggacagagccgagatttcataaatgggaagaagacagtgtaaaccagcagcctgttctcctaggtcttacagcaaaatcaatattcccttgctgtgagacccgaatggtggaaaccagttggctgaggggactaattggagccttttgaaaattccctggctggaattgagatgcaggttaacagataagattgccagctcgtgtgttatttttcaaagctctctcctgagattgtgtttgtcacttggcgagagtgcttcatgtgtcccacaaaagcgggaacagccccaccactcagagagccctctcttccctgtaccctgcccctctcaacacacatctgagtgtctccattgctggcacggttgtcaggaagacactagggaagggcttttatccaatgggataaaaacctcccccaaatcagctgatggtagctgagatcattcacatctagcaccgggaaggcctaggattggggcttgggaatgatgatgatggtggcgttcccgggattgtgctgattgtggatgtatgaggcctgtgtctcgcagtggccccaccagggcaacagcaaaaatgacgttattatctccccatttatggatgagcattgaagttcagaggggttaagcaaggtgaccaaggacacatagcttgtaagtgacaaaaccaaggcttgcgtccgggtctgtctcacttcaaagcctgtgagtttccagctgaccacctttccatgtcctccttgcaaccccagtgaacttccctgaatccccttcctcagatccctgtctttggtcaaggatggtggtgatggtgacagacaccagctgagtattggacagcgtttttacctgattcccatgatacattgccatatcttcaattgctggtgaacatgtttttcataaagtgcagattattaaattgttcaaggcaattgggaactctttttttttttttaggccaccaagtcagtgatcctgtttgactgcagttatttttcatggtgacacctcctgcttatgtacagcccaacatctggtggcatactaaaggttctgagaagttgatgagaaaagagcagatgacttcttttttttccagaaaatcctcttgccctcattgttggctggaaaagcctgactttatcgcattccaccctgctaattatgggagtggctgcccagtgctcagagacagaactgagactttccctgaagtgtctggctcatagtcatgtctgtcagtctttctccaagacaacaagctgtcctgatcaggtgcatcaaactgccttgcatccagctctacccattttcttctaactaagcatctttctttgccttttggacggtagtgatttgctttggttttcgcattcactaggctctacccataggtaccaggttgactcccagtgattatctctccaagctaggggaagagttgctggctgcagggcaggtttgcattgaggaagaagactcagtttagtttcaacgtacatgtactacgcaacctaatttctgctggatatggtgcccaaaactggggatagagagatgagacatagctccttaccctcaggtggtgctcagtctagttggggtggttagggaaggcaggcacagcagcaggggatagggaggaggaatagtgatagaccttggtctagggcattggaggaacacagaagttgggtagaattgaggagaggagaagagaccagggaaggatgttgcagggtgaagatgctggaggcaagccctccaagataagtagaacttagccaggcaaagaaggcacggtggggacaagcagagggaacaggcttgagaataggcacggcaaggacagggatcatggcatatgtgtgagcttggagtgagctggtttaggtggattatgcagtgcaaagcaggtaatgatgtttgtatttggcatcttaactcacaagtgacagaaaacccaaaccaaactggcttacagaaaaagggaatttgttactctctgtaagtcagtagtcttggggtaacctggctgcaggcacgggttgatcaggggctcaaatgcagcacctcccgtgctccagctgtgcatctccctgctctgttttctgcatttagaagtcacaatcacttcagaagctatttgtctgaggttacgcaggttgcatccaggcctgtctcacttcagagcctgtgggtttcctgctgaccactatcccttctcttccttgcaactccagtgaactttcctaaatcccattgctgaaatccctgtctttggtcacagatggtggtgacaggggcagacaacagctgtacatttgacaatgtttttacatgatttctgatatgatttggctgtgtccccacccatatctcatcttgagttgtagcttccataattccccacgtgttgtgggagggacccggtgggagacaactgaatcatggggggcggttcccccatactgttgttatgatggtgagtaattctcaggagagctgatggttttataagggaaaaccccttttgcttattcttgttctctcttgcctgccaccatgtaagaggtggctttgctcttcctttgtcttctgccatgattctgaggcctccccagccatgtagaactgtgagtccattaaacctgtttttctttataaattacccagtctcagtatgtccttattagcagtgagaacagactaatacaattcccatgatatatggagacactcagttgtgtgttgagaggggcagggtgcagggaagagagggctcttgagtggtggggctgttctagcttttgtttgggcacattctcaaacagcctttcttctcatgggcaggagtcaactgtggaagctgcaaatgggatcaacttgacttcaagtcagtgagaaaagggtacagctctctatcccattaattggaaaagctgcacccaatcataggcaatgatgtgcccattcctgaaccgcttgctgtggccaagggaatgaggtgctctgattggctgaggcccgaatcataggctctgtccagcacacacggtgtgagagaagggaagacggaggcttcccggagagtggtcaggccacggttaccaaagagggtgcaatatgaaccaggtggcccaaaggatgagctagtcagatgggctttgtctgcttgctgaagagcttgggcattgacccagagaatttaagtggaggagtgacatggtatgattggagctttaggccaatcattgtggtggcactggggaacctagggtcgatcagggaccatttggaggtcctggcaagtacagctgatgaaggaccaagggcaggagtggagaaaacccagaacacatgaggaggtagaagtgcctggacttgatacagcatccccctgcttgcccagtaagcaaaccgagatgagctccaccaagcagttgagtcagggacccagtactagggaataacaaggcttctgaccatggctctgcacagaatatgcaccttctacaagcaagggagaaagtacgtctcctgcccccaaagtagccacttttgtccttgaacagaagagccgcagaggtacttactgctatttttattgattcaacaatctgctactcgctggcctccaaactcctgagagttatgagctcattactgccaaccacattcctctaaagtacacattaggttcataaacacaatttcagggctctgtgcgaaatggagatgctctgtaatagaaaattagcttcttccccaccagctccaccaagtttatgtttcgtctccttggatggcagtattcttggtaggggagagaaagcaatccatggagctgggagtattagaggctgattgccgagtaggagcctcctcttgtccccaaccatttaatgatccggtggctgcccaatgtgtgggatgacctgtgacctgctctgttctatttaccaaccaaagagattccatgcagcagccttttagcattaacagaaataggaaaggctgccatgcactggttgcattcaagaaacggatggggccgggtgcggtggctcacgcctgtaatcccagcactttgggaggctgaggcgggtggaccatgaggtcaggagatcaagaccatcctggctaatggggtgaaatccccatctctactaaaaatacaaaaaattagccgggcatggtgatgcacacctgtagtcccagctactagggaggctgaggcagcagaatcgcttgaacctggaaggcagaagttgcagtgagcccagatcgcgccactgcattctagcctgggtgacagagcaagacttcatctaaaaataaataaacaaacagatggtttctaaccaaactggccttaccggatacctccagttctctctttcttaaaataagggagtgatgtctttggcctggataagcagcttgagccatatggttcttctggattcagctctagaaagggcccatgctcagctgtttagctttggacagttattgagccccactgaagctcagacctgtcatctgtgggatagggtgctggacccaccctgagggattatcatgaggcttaaatgaggtagaacagctgtagggagctcagtgcaagttctagctgagtggccctgggcaactctgagataatgcccttcagtgattcttggccaggggtggttttgttttgtccctacggggacatttggcaatgcctgaaagcattttttattgtcacaactggggtggctgctactggcatctcatgggtgcaggctagggatgcagtggaatgtctcacaatgcacaggacagctcccatacaagactgtgttctcaatagcgggtagccgtcaaatggtaagtgctctgtgccagggactgtgctaaatgcagaaagtcagagatcagaggcagatgcccaccgctgagtacaccgctccgtagagaccagaggagttcagaggagagttgcctcatacagcctggaggcaggatggggtgagggggtgaaggatggctttgtggatggggagggcatctgagctgagtctggaagttgctccaatcattttctctccttcttcagtggatgtgagggagggtcaccagccctggggactggtgtcgggaagaggtagcttgcatctgtgactgccagacccctccaaatgtgaggtcacatgggcccatgggtgtgaggagaggagccgggtggtgaaggtgtcggcaggcatggtgctgtgggacaggaactgtcacctctgctccgacatgagatcacaggtctatctatcctgttcaagttgggttttaaaataaaattgctccttgttctgactgcagctgtcatttcttttgttatttctgaggccgtttgttagtaagaggaataatttagagcttggaggtggacttcgtcttggctagttgctaggcacccactttctcaaggcacggggccctagatgcaaaaaggatccccagcagtaagacctggggctgtctcacttggtggcagcatgtgcctcccctcccacccttcattctcccaggcgtatagacagcagagtgccagtgtggcatttccacagacgaaccaactgctgtaagcctctgaaacaggaatgttacatatatggctctcatgccacctggccctattcacctgtccatggcagacgtggccaatcaatcacagactttctcatcgaactcagatgcattctcagaatcatcccccacatgaccaccatcttccccaggcaaccaccactgtacactagagtaggcaggtagctctagacttggcaggtttgccatccttgctggaaatccttactggcggtgtgaccctgggcacatcatataaccccaatttatttcctcttaaacaaaatgcagatgcctaatgcctactttgcagggttgttgtgaaaacgaagagaagtaaaaacaaacaaagtggctgtcatggagtccagctggagtaagggctcagtaattttttttttttttaagaaatggggtctcactgtgttgcccaggctggtcttgaactcctggtctcaagcagtccttgtgcctcagcctcccaaattgctgggattagaggcatgagccacctcgctggccctcagtaattgttccttttcttgctttttgcataaaagttacccttcaaagactgcagtgggacttgtggttcatttaattctgcttgatattgtcatttatcttttcagctgtatttgtttgagtcctcaataagactgtaggcatttagatggcagggaaggtatctttggaattttttttgtcccctggccttccatcaagatgtggtaattggatgtataggagtgtggcagacactgctagttgcttgctgaaaatagccatgggttttttttgttgttgtttttttccttatctcttagtaacagagccctgggcattatgcccacatagaaaatagtaaatttctcagcttcccttgcagctacatatggccatgtaactaagatctggccagtaagatataggtagatgtattggttgtggcttcccagaaaggctgcttatacctcatctgcgtggtacatgccttgcctttctgcttcttgttgcctagaattgagatatgataggtggaactccagcagccgccttgggccatgtggtaacctgggggatggcaactctgcagctaagatcgcagagcagaaagatggacggcctcagtccctgatgactaaggagagcagccatcccaattctggactgcctccctgcagactgcttgtccatcagaaaagaagccccaagtgattagaccccagctattttggaaccaaatgcgattcctacctgatgcaaagagctctttgagtagaggctgagagaactgctgcccagaactctagaggtgacatagcacatggcgtttagggacttatagtcaacagctagttatgagtttccatgggccacaggtgctgctggcgaatgtggcttgctgctcagttgaagagcgaacatcgaaaataacccgaagagagaggtgaggaagaacagatcaggcagggccctgcaagccacgtctgggaatttagacttgagcttgagtgcagtggcgcatcattggaggaatgaatttatttatttatttttattttttatttttattttttgagatggagtctcaccctgtcacccaggctggagtgcagtggcgtgatctcggctcactgcaacctctgcctcccaggttcaggcacttctgcctcagcctcccaggttcaggcacttctgcctcagcctcccgagtaactgggactataggcatgcaccaccatgcctggctaattatttcgtgtttttagcagagatggggtttcaccattttggccaaagtggtctcgaactcctgacctcaagtgatccacccgcctcggcctcccaaagtgctgagattacaggcatgagccatcacgcctggcccgttggaggactttaatttacacttgggaaccattgctctggctgtggtgtggaaaaggagtaggaggcaagatagctggttttgtccctcctgacaaaggtttcctcctccttctagacgacctgagtctgttagccagctccaagacgcccttctccttggtagaaccccaccgagtctgatttgggtggcaagttagagcttggtctacgcctggggtttctaaagcccccacacctcgtggcccttttggctgggacttccagaccctgggtctaccccatcaaggactttttttttgagaacctccagcattcctggtcagccacacaccaggcaagccctgcataccggcttggccagcacccgccgtggctgtaactgacctctaggtggcggtggccacctgctgccactctggctcccagagccctggccaaggaagtcctctttctccccacattagccagtgttccttgtctcttccctccctgagttgtggatcccgggacctacctgtttcttcctctgtcttaggtgagacttttctgacttcccagttttcgctgctatgagtgtcggtaacttcatccagtaggctttgcaaagtctttatttgtgcagaaggctggaggaggtgtcacagtgccacacacagagacttgcatatgcagaccttggtcttgactgtcagaagcgtccatcctttgctcactgccagatgcttataagcaaggatagatgagatgtaggtggcccggtatggagggtaagccctccctccttccttctttcctgcttgccttcttgtttccttctcttccttccatttatccatccatctacctacccacccatctagcacccgttgggcatctccaggaactgagggctcctaggggtttccatcttggttcttgccctcaaggaattcattgcatagtaaagatgaagacttgtaaaggtacaattgcaagtaaatgttcaggtgatgttcatttattcatctgttcatttgtttgttcattcattcattcatagtattgaatatccattatttccaggcactggtctgggtactagggcatagtgaataagactctggtcatgtactcccaagaatatgtataattagtatttgtcaattaaaagaataaaatcttaaaatgtgcagagcttacgttcagtggagagaggacagcaagccatcaataaataaagtcttgatatgtaccacagattgaggtcagcagctgcgattgcctgccatttcaaatgattcatcttgtaaacagacagtgtcaacctatggcatcaataaatacagcacgatactggaaaaaactaggcaagataattgctcattataccaaatgctgtgaagaagcagagagagaatgatggtagaggatagttttggggtggggtaagggtgtatactgggtggcatgtgtgcacgtgtgtgtgtgtgtgtgtgtgtgtatgtgcatctggcgaaagtgatgtatacctggtggggcagtgtgtgagtacttggtagtgtgtgcacctggtagtgtgtgcatggatgagcatctgatggggtgtgtgcatgtgtgcctgaagggatacgtgtgtgagtacttgatagtgtgtgcacccggtagcatgtgtatgtatatgtatctggtggagtatgtgcatgtgtgcctggggggatgtgtgaaattgcctcctttcagggagaggatgcattgggattgtgagcttttccaaaggtggaaaggttctgagctgctggccttcacagagacgtacctaggttgatgggagctgctcaggagcaccctctgaactcccagaaggcccggggcattagcatcttgtctgccgatggcctccagagagaacactgtgcatctcaggaccaaagcagtgtttgagttgcattgacagagttgattgtgatactcgaggcttcctttgccataatgccaccctcttctagtgggcagtaagctgtgatgtcagaccagacccctttacccttttcttctccttactaagtagcaatacattcagggcaggtcaagtcacattgtgtgttcatgtagcatttaaggagagttcaacccctttccagaattgctaataacagtacaataaacaccggtcatgctttatgcatgtgttatgtcacaaccctcttaggtgggtgctaatactatccccgctctatagatgctaaaactgatgctcagaaaggtaaggtaggttggccagggttgtccagctggcaggtggtggagtcgggggttaattgaggcagcagttcccacagcctgcactttaacctctgttctctggagtggggcctccccactcttagtgattgggaggcatctgtctgtgttttgcagagatacggcaggtctcaagaatggcccacactatacctcaatgccttgtctagagcctgagctctttctctactgcttcaggacagggtggtctggaggaagaacacagattaggtgggggaaaagacaaaggttcaaatcacgtctccaccactcactctgggtctttgggcaaggccctgttcacacctcatttacccatcataaaaagacttggaccaggcaaaatggcacacgttagcctctgccgtggtgctttgcaagcctgcaagatggaaaaatgttcatcccagccccatcttgtatgtgaggaaattttaaaacaaaattgaatgctatcttacgggcattgttatgagagagaaatgagtacattgggtaaattaactgtattacgatgtttgtggtctgcatacgggtgcaatttgattgcgtggggagacaaaagagggttcctcgtgatgactaatacatctctttaaacatacattagagagaggtgcagagagtgtgcctatcacatctgaaatgttctattgttctgtttgtttttcattactctgaaatgattactgcaaaaattcctaaattggatgcttttcaaagaggaagattaaagaccataagcacagtcttgcagctgtgcaaaaaagactgtgcatctgtagatggatggagagccttaacagcttcaccttgggctctgcactgcacgtggagaaacctcaggcccattgggaagtggcagccacgttccatctgtgagcccagagggaccttagttggcattttgtagcatatctgccccgagctgaccaccatctgcttggcattatttaaaacctcttaaatgcatttcggcgggggacaggtctccataacactgggacagggaggcagaagtcttctggagaaaccagacggaaaccttgcctggttgcagaggaggaagaagcatcaaacgcgagccctatgcagacactgagtggtcttgcttctgtggctgcctgagaagttgcagctctttgattaaagatcagtagttatttgagggttttgtatttattatgtacattttgttgttagacagctatcactggtcctgtttctagagggagaaaggaagtatttatactcttggtgttggctgcaaggttgtcccagccaacaattcccagtcacggcgaaggatacaggaaggagctttgaattgtgtagatgagttagaaggccagttaaacccagaaagggcaatgctgtgagcaccaaggaggaggtagcctttggagtgtgtcgcaatccactccccttctcttcctgcacacgccgcacacatgcgcagaggcaggctctggccacagctcattggcccagagtgagcactcacacaggagaaaactacccagatactggcccaatcagattctctgttggtctcaggtcttttcactacaagtggcaaaatcttaccttgagctggctaaaacaaaacaattttttgccttatataagtaaaacattctgttgtagcttgatctagggtctcagctattctccttcctcctccctttctcccttcctcctcctccgccccctcctgctgtcttcttcccccacctcctcctccccggtccactcccccctcctcccaccgtttcactctcccctcctcctcccatttcactcccccctcctccccctctccacttcccctcctcccctatcctcctacccgccttttcccccttaggttctgcgtctctgtactgtgttctctagtaggttcctctcctgtggggctcaccagcagctctgagcttagatcctcacaggccaagaaatgtggctatgaaacccctcagctctctccctgtcatacaggctcctgatgggcctggatggggtggaacaccctcacggtggtgcatgcaggactttgattttcccagccttgatctcatgcctactctagggtcagagctggagcgggacccatagggagcccagagacaggctgggtggagagtgggtccctaaaggagaactgaagaagaggaagtggatggcaggcagagaaagacaaccactgttcgcacggaggcttcctcctggaccatgcgggattatgcctcagagcctgggtcagtctgcatgcacgtggggctgggtggagggagtgtcatatctagaccctgagctcgggaggtggagaaagcaaacttgcagggaggaagcaggatcccttgggtgtgcagaggagcagagcagcatggcctcgcagctaaccttggacttgggtggctttctggtcactggtcctgcccctcaggaggcccagcagtctttccagctcttgctttttttgagatacccttgtacccgtccagtaataccccatttccccaaagccatagtgaactggcctttcttcctggtaatcaaagagtctgtgactaagaagatagaaggaccagcgacaccatcggcctagctcacagagttcctctccagaagagaagtgcctggctcccagtgtggttggaaatataccgaacagaagcatggctcagcttccatgcagccagagaagctcctgattctgtaaagcatagttagctgtggcaggagggagagggccattcaggatcacatcagaaggtgacatgctagtggccgtcctggctgaatcacgacctccccagcccattccttctcacaagagctgttttgccgaatgagacttcatcacccaaccacggctcgcagccagacgcagccgaacaggcctagtgcggctgaaactttccttcagagggggaaaccctaaaactgtctgctgggcatagtgatttctttagtattttcagagttgagtgccttgcttgttcaaatgccaagattatttttaagtccattatattctcactgatttcctattgtcaagaacattttatttggaaaggtcttagtgtaaccaaagtagaaaactccttctatatttttagcttggtcttccctcttgttacctcctcctccccctggccagctcctcttcatccttcaaggctttgctcagccatcacctcctccaggaaactgcattccatgtcacctctccttctggcctcctgtgcatccctatgccataacacttattccactggactataactttttggctggctggctgcctcacaaatgtgtgaactcttttttttttttttttttgagacagagtctagctctgttgcctaggctggagtgcagtggtgcgatctcagctcaatgcaacctccgcctcccgggttcaagcaattctccagcctcaacctcctgagtagctgggactactcagggtgcatgccaccatgcccggctaatttttgtacttttagtagagagaatttcgccatgttggccaggctggtctcgaacgcctgacctcagccttccaaagtgctggtattacaggcgtgagccaccgtacccagccaaatgtgtgaacttctttagaacaggcacattgcttttgctaataatagccgacttttgttaaatatttaaatgttaagcaaagtagttgattttcaaacacagtcctagaagttagatgcgataattgcccacattttacattaagaaattgaagcatgtgtggagagctttagcaaattactgaaggtcatacaactaatgagaatatgaaatcaagattctatctcaggcagccttagtcttattgtgtccataaccactgctccaaactattggctcagctcagtatctctccttggagccaccacaagtctggtgcctagtaggtgctcaataaacattgggtgaacttcaagagattggatacctgtgaatgtgcagctgggctgacttggaaggaatttccagaggtggttttgctgcttctattactgtgacgaggggtagaggcacgtttggcttcctgcctgcatggaattttgcagtcagagcaagttctaaccgcagcccttcactccttctctccaagacaaatggaaacttattctgttcttaaaactcgtctcctctatcagaagctttttcagaggctctggtgctgaggctgcagggtgaaaagtaacctcccatccgtcacagcaattctgcttcgggttggaaaacaatttgaagcatcgcgtcttccaagaggagttttcctttaaattttttatgatagaaaatattcaggctggccaggtgccattgctcacacctgtaatcccagcactttgggaggctaaggcgagcagatcacttgaggtcggaagttcaagaccagcttggctaacatggtgaaaccctgtctctactaaaaatacaaaattagccgggcatggtggcaggtgcctgtaatcccagctactgtggaggctgaggcaggagaatcacttgaacatgggaggcggaggttgcagtgagctgagattgcgccactgcactccaacctgggtgacagagcgagactctgtctcaaaaaaaaaaaaaaaaaaaaaaaatatatatatatatatatatatatatatatatatgtatacacacacacacacacacacacacacactcttatatatgagaaaatatccagaccagtgtggagatcaatatctcaaacaccctgaacaccctgggcctcagctgtggcttcgctctgggtgctgggctcgatctcttgccataggtctagtccccagcgagctctcagtcctggccctgcagcctgggctggaccctgcttccatggtcagcttcactttccgccattcactcttggacattgcctcttttttcctgaaggatagagacgtgcctttcattttgggatgtgacttgccttttcaagtacctctacagtttagtcttcatccaattgtatctggggagaagagggaggattggaggtgtgttgtcttcacagtgccaaccaggagtcccacttaacttgaaaaatagcatttaatttttctgttaccaaagtctgttcagtagaagaaagaaatctggaaatcttgaaagaagataaacaaaataaaaatctatcaccattcagaaatagcagccactgttaatgttttaatttgtatcccagtcttatttctggggatttcattatacacacacacacacacacgtgactggagtcatacttatcaatatatcataagcagtgtcttaattccatgatttcagaataaacaagggtccagcttctattcctcactgcctcccccaaacccaggaagacttggcaggtgtttgtatctatgaagagagaagcagaagcctgctctaccttcacagggaaataaaaagctctatgcagaatatcagtgccgcaaatggagcagcctgtttagcaatgcacatggctaaggggggatcatgtgcatgactcaaatatccagactgcaacatgtgactgcaggatgaagtcatacttccttttacatccccctgctatgatcgctggatcccccagcagcttgattgccggaaattagctcccatagcagtgactccagctatttctgagtttcccaggagctgcctcacgtggactcagggactcgccccttgtgattttctctgtggcccctgctgctgctgcccatgctgaagatgccccttattaggacgccaggctcctgggcactgctgcccgtcagcggtcgttgtcgctctgacttggggtggaggcggaggcactttctctgcattgctactcaaacccagatgtgacagctgggcctgtgccgtatatccacacaacacaactgaggtgaggctagaagtttttcattgcctaatcacctctgtattagtcggttttcatgctgctgataaagacatacccgagactgggcagtttacaaaagaaagagctttaattggactcacagttccacatggctaaggaggcctcacaatcatggttgaaggcaaggaggagcaactcacatcttacatggatggcggcaggcaaagaaagcttgtgcagagaaactctgccttatacagacatcagatctcatgagacttattcactaacaagggaacagcatgagaaagacctgcccctgtgattcaattatctcccaccgggcccctcccacaacacgtgggaattatgggagctacaattcaagatgagatttgggtggggatacagaaccaaaccatagcaacctctattattaaaaattgtttttaaatttttaaatattgacaaataaaaattgtatatattcaaggcatacaacatgatggtttgatgtacatatacatcgtgtaatgactgccacaatcagattaacatatccaccacctcccgaagtgagtgtgtgtgtgtgtgtgtgtgtgtgtgtgtgtgtgtgagagatgacacttaaagttggctttctcatcacattttgagtaaacagtaccatggtattgttagccagagtccccatgctgtcatcagatccacagaacttatcttctaagagaaagttataagatgtaccctttgaccaacatcacctatctcccctatccatccccccagcccctggcaacccccgtctgttctctgcttctatgagtttatccatagaacttcactcacgtccgcctgtaagtgaagtcaggcaatatttgtctttctgtgtctggcttatttggtgtaatacgatcccctccaggtttatccatgttgtcacaaatgacagaattcccttcttttttatggctgaatattattccatggcgtgtgtgtgtgtgtgtaccacatatattccatatgtggcatgtttatgtgtgtgtatataaatatatagacacaccacattttctttatccattcatctgttgacagacacctagtttgtttccatatcttgtgaataataatactgcagtgaatatgcgggtccacatagctcttgagggtactaatttaatttccttttttattttaaagtttcattttatttttcagttagttaatttgagacagggtctcagctctgacacccaggctggagtgcagtgatgcgatcacagctcactgcagcctccacctcctgggctcaagcgatcctcccaccctagcctcctgagtagctgggacttacaggcatgtaccaccacacctggctaatttttaaactttttttgtagagacagtctcactgtgttgcccaggttggtcttgaactcctggcctcaagggatcctcccacctcagcctccgaaagagttgggattataggcctgagccatcacaccctgtcttattttctttagatatatatccagaagtaggattgctggattctgtatggtagtgctatttttatttgttggaggtgccttcatactattttctatgatttactttcctgccaatagcgtacaagagtttccttttctcgataccctcaccaacacttgtctcttatcttttggagaagggccatcctaacaggtgtgcagtggtatctcattgtggttccgatttacacttctctgatgagtggtgatgtgagcaccttttcatctacttgtaggctatgtgtgtcttctttggaaaaatgtctgtttacatcctttgcccattttaaaatcagattatttgggatttctgtatatattttggatattaaccccttatcagatatgggggttgcaaatatcttctactttgtaggttcttttcattttgttgtttcctttgctgcacagaagctctttagtttgatgtagtccaacttattttgtttttgcttatattgcctgtgctttggtaacatattcaaaaaaattactgccaagactagtgtctacaagctcattccctatgtcttcttctaggagttttacagatcttacacttaagtctttaatctatttcatgataatttttatatggtgtaagacaaggctctaatttcattattttgaaggtagatattccgtttgcccagcaccatttattgaaaagacagtcttttccccattgtgttttcttggtggctgtgtcacagattagttgaccatatatgtgtggatttacttctgggctttgttctgttctcatggtctatgtgtctgtttttaatgacagcagcaaacgattactgtcgttttgtagtatagtttgaaatcagggactgtgatacctccagctttgttctttctcaatattgctttggctattcaaggtcttctgtgtttccatatgagttttaaggttgttcttgtatttatgtgaaatgtcattggaattttgatagagattacattatgtagtatggacgttttaacaatattatttcttctagtccataaacttgggatatcttccatttgtttgtgtttttttttttcagtttatttcatcaatgtctgatacttttaagcatatagatatttcacttccttagttaagtttattcctaagtattttatttgacaaaattcaacatcctttcatgataaccccccaatgaatgaggtatagaaggatgtacctcagcataagaaaactgtatgtgacaagcctacagctaacatcatactcaacagtgaaaagctgaaagcgtttgctctaggatgaagaacaaaacaacgatgtgtactcctgccgctttggttcaatatagtactggaagtcccattcagagcaattagacaagaaaaagaaataaaaggcatccaaattggaaaagcagaagttaaattctctctatttgcagatgatatcatgtcatatagaaaaccttaaagatgccaccaaaacaaaacaaaacccacaactgccagaactaataagtaaattgagtaaagttgtcagatacaaagtcagcatacagaatctggtgtgtttatatacactaacaatgaaccatctgaaaacacaaatttagaaaagtcccatttataataacatcaggctagaacttttaataaaactttatatacagcagcatagtgatcatgggagagagatacagcagggggacaacttttagtggctactaccagatgaacctgccgtcagatgtggcacccccccttccagagtcgcggcctgtcttcagagcgtctttgaaaggggccttcatgccttgcttgtgtccaccactcccttgaaaaggccagcttcctacctcaccatgatctacctggagccccagcccaacagccatgaaccaaagcatggatagtttcatgcttaagttgtgtcctccttagttttctggcaggggctggtgttggcagcagttgggactgaaagaggccatagcagttggctgcctgggctcttgggtcctcggtgggctccgaggggattggaaagtccattaacttagcagggtgacataaagtggagactgttccatgagtcctctaacagaggccatttgcatcttcctttggtggaaatggtccagtccatggcatatctactcatagactttgttttagagccaaagggtgggcacctggaccagaaattcagtgagttaggggaacaagagtgcccaccttttcccctggctttcctaggtgtgaaggaaaaggcagtggccagtgatgcgaagatgtgggccatgaagtcgggcagacctgggcttcagtccttgtttcacttctaactagctctttgctagaccagtggctcagactcagtaagggagagttgcaaattcttctccatcagggcttatggcaagtaaaagtgaatgggccaaccatggtccatggccagtagtgctaaaaatatttccttttctcttagagacatacatctgtgttctctctccagtaatctaaaagtgagtgaaagaaaacccatttgtatataaatggctatcgctcactagggcgaagatccatgctctccttttccttttccaaatccataagagctgtagatgacagtcccatgctctgagcagcccccggttattgtatttgacatgtatccatcaggcacatgcacagacacacgggtgacttcctgcttctgtgggattgagaggggcaggacctgtcagtaagacactccctggcagtgctctcatggacgggcaaatacactgcctgcatccactctgacctgttcgttcattcgtttgttcgtttgttcgttcgttagttcgttcgttcgttcattcattcattcattccattcactcattcattcattcattctgtccttcttaaaagtttagtcctgggaatatatactgagtgtttcttttgtacttcctgtggataaaattgaccagatccatgtcctcatggagctgttcctctggttgaaggagaaagacaacaaacaggtctacctagcatgccagatggtggtcgtgctggggtcagcactgacagttgagccagaaacctcacggagtgaggggataggcatcgaggctgtccagggacagggcactccaggcagagggaacagccacagctccagctccggctctgtggctccacccacttcatcatcctctaacatcccggaccgggccctggtcacctccagtatcgtcttggatccctcgtcctccctgccccagctgccccagcctcctttcacttgtcccctgttacacgagcccctgccacatgttccctctgccctgccctttgccctacagctgttccccttccaggactgtctactctgactccttttttttttttttttttttttttttagggggagttttactgtttcccaggctggagtgcagtggtgtgatctcagctcactgtaacctctgcctcccagtttcaggcagttctcatgtctcagcctcccgagtacctgggattataggcacccgccaccatgccccgctaatttttgtattattagtagagacggggtttcaccatgttgtccaggctggtctcaaactcctgacctcaagtgatctgcctgccttagcctgggattacaggtgtgagccaccacgcgcaacctccaactcaatattttggttgcagatcaaacatcaaagctcagctaatccaaccccactcccaggcgtggtgcccctggcagaaccaggccccctcccgcagccctcatctccctttgaaagcctgtgtttctatgggtgattattggcatcaggtcagctgaggtccccaaggactgagccctgggaggctgggatcctgcctggttttgttctccatgatagccccagggcccagcccggagcttggtatacaacaggccacctggtggtgactgaggagggaacacgcagttctgcctgggggacagcggggtttgggaaaattgaggagggtcttgaaggaggagtacacaccctcaacctagcatccagttctcatcatgtctaaaaactaataaaacagcacaggcagtgtcagcggggtgggaaggctggtctttgggcacttccggccatgccagtttcagaagcattgagtcaaatgtccagagacagtagagcatgggctgaaatggagtgaacgtaatctgtgcacctcagttctctccgagacacaggggctgctcttcagctacagttacggtaccacggttccaggtaaagcacagactggctgggtctctgccacatccagacctttatgctacatccttctttcaaagatctgtggaatggtgctggcaattcttagtaaataatgcatttcctcttgtactaggctgcctcatttacataacccagtgaactgaaaagtcgtttttcttgggccaagttattcatcttattcttggcatttggctgcaataatatccgtctatcggcatggccatacaataattcaggcattttgttctagcagtgaggacacttatagttaataacacatgaagccatttcattaaaaggaaagttttgttaggatacattaacacaggccttgaaccaaaacacaaatcatttcattccctggctattgaggaagcaaaatgaattgggaacctgaagccattttttgaagaatcgttgttatcctcatgtcatctgattctctctgcattcaacagtcagcataaaggggatcagggttttaaggagttgataacacttgtttttctctgaggtggaaaagatgtggtataggctttaggggcagcattcactgaaggcccggtgctagttccgctgctcactcctcgggcaatagagagcgcatttcttagttgctccaggtttgttttaaggcatacaaaactgcagggctggctgggcgcagggtggctcacgcctgtaatctcagcacttttggaggccaaggcaggtggatcacctgaggtcaggagttcaagaccagcctggccaacatggtgaaaccccgtctctactaacaatacaaaattaaccaggcatggtggcttgtgcctgtaatcccacctacttaggaggctgaggcaggctgagaatcacttgaacccgggaggcggaggttgcagtgagctgagatcgcgccattgcactccagcctgggcaacaagggcaaaactccgtctcaaaaaaataaaataaataaataaataaatcgcagggcttttgtgaacattgtgcgtaacatgtctggcacctgacaggtgctgtgaaatggtacagctttttctgtacgtccaagaaagttccagctaatactagttttcactcttgaatattacaacatgcagaaaaaagtatttagttttgagatgcaggactttggatcattaaggagttagtgaagtttgaaatggagagggaggcatttggtctatgctgcaggaagcaggggcagcctgacatgttggttccacgttcgctgtgtgtcagtgaatgtttatttctgagttctcaccgccttcatgtcagcgggtttctctgtggggtctgatccttgcaggggtttgtaacatccatcaagtatctcctacgaggtcctcctcctaaaatagcactcttgcccgggaacctgggggcttgcgtggcagggactggataaatgcccaggccggcctgcagccagcagagaggtgcaccgagcttgttctgagtcagaagcccggggaacgcttcccgggttttgttttagcactcagaaacccactcgagaaggtcatttcctgaactctgctgtttctgttgagttttctgaaagcggaggggatgcttagctgtccaatccacagagcacgctttatgtttgtgtttccccgcctgcctagcatttgacaattaattagccatggtaattacctgctttaatttcatgattgcacatcctataattagccctaattctgtaatagggaagttcatatacacaaaggcagccgatgatgaaggtgataagggttacaatattaacagctgccattgcttattgcctgccaggcatgggcgaggcacgacacctcacaaccacccagtgacattggcattggcctgccttacagatgaagaagctgagtctcaatgtggggtgtcatccccagggtcacagcagccgaaaaggataactgtggggacgtgaacccaggcctccctccctatgtagctgtgcgccttcacactgccgttctgcctcttgcaggagcacccgagatctgacatgctttgggctaaagacgcccgttcctatgcttggcacacccttaaaccagattgagggcttcagccacttaaaggaagcttttacatcttcattctttctgtctgtctgcctgactccctccccacatcttcttttccacccgcttatgggagtgcatgtttgtgtgtgtgtctgagataaattttaccctggaatgttgactgcttggtggttagatgttttagtacgtgtacaaaatgttgtcctgaatataattgcttaattctcctcctcttccaaagacttagcctctagcactatcttcatttatccaaatagagactcagggcttgaagaggtgaattaacttacctaggatcacttggctggcaaggggtgcagctggaattcgaacccatttctcactgaggccagaatccagtgtctgggctccctcccgatgctgacgtatgacgatgtgtcaggtccacgtggatgtgtacccacagagccttggcactacctcctgccccatctacggcctggcttagacatccctgccccacaagttagggtgaaagctcactctcccgaggacagcgaaggcagggctatgttttgtttttgcttttaaattcaggattaacataaaatacaatcaggtgtatcaatcttaagtttatggttcaattaattttacttctgtatagacctttataaccactgcccagatatagatcctggatgtttccagcacccagaagactcctttgtgccctgcacaagaatcctttctcccgcccaaggtcatgaagacattctaccatgttttctcctcctcgctttatgatttcacttttcacactgaggtctatgactgcaaaagacacaagtgcaaaagccacacacgcaaatgttcatagttgctttattcatgaaagtctcaacttgaaacaacctaaatgtccaccccagcagaacaggtggatacaaacagggaaatattcatacagtggaatactattcattagtgcaaagcaacatgagggccatacacagaaacacagctgcatctcacgtccacagtactgagtgaaagaaactagacccagaggagcacacactggttccgtttaggtcaagttcaaaaacaggggaaggctgggggtggtggctcacgcctgtaatcccagcactttgggaggccgaggtgggtagatcacctgaggccaggagttcaagaccagcctggccaacatggtgaaaccccgtctctacaaaaatacaaaaattagccaggcgtgtggcaggcacctgtaatcccagctactcaggaagctgaggcgggagaatcacttgaacctgggaggtggaggttgcagtgagctgagatcatgccactgcacttcagcctgggtgacagagcgagtctaaatctcaaaaaaaaaccaaaaaaaaaaaaaacaaaaaaaaaaagaaaaaaacagggaggaaatctaggggatagtgcttagcattgcgggagagcactattgattagaacagggcacagtcaagtctcataggaacactctggtagacgctcttcatcttctaaaagaaagcgtctccttgagaccttatctctactagagcttgttttggattctgttcattgacggactgaggtttttgcatttttttctccccttaaccttcctttacctccactgttattacagacatcatgagggtaattcttctcagtggaaaagaaatcttcagatttgaacttcctcttaaaatgaagaagaaagggtttgccccgatgcccgattacagatattaccctcctatttaatcttcttttgctgagtcaaggagatccgacataaagtggctttttattgcttgttttaaaaggaaacttggttgtgtcagaagaggtcaactctttttatccctccaaggaattattatctttatggctcaagcagaaggaattggagctgatcgaacttaatttggaggggagaggcttttaaaataacaaacaaaacaaaaaattctaacaattttgggcctaagccctctgaaatccttagtgaaataagtccatgatttagttaagtatatgtaattcaaggacaacttaatttgcagagaaagtttcctaactttggatgtttgaagcactgttgttgtggatcagccatttgggtaattttgagtaattttgagtaattttaatggcattagactagcttcgattagatccaaagggagaggcacaaatgaggtgagactggaatgtctgacagcaaggagacctttctgagaacacaggatctgcaaagaggtgcctgggcttcaggggaacgaggcaagggcttctggtcccagctacccacattgctggcctggggttcctggtgccttcaggattctgggtcactgcagcagagcagcctgctgttgtcagaggtgtttgaaccagagcaactccatcttgaataggggctgggtaaagtgaggctgagacctactgggctgcattttcggacggttaggcattctaagtcataggatgagatgcgaagttggcacaaaatacaggtcataaagaccttgctgattaaacaggttgcagtaaagaagacggctaaaacccaccaaaaccaagatggctactagagtgacctctgggtgtcctctctgctacacttccaccagtaccgtggcagtttgtaaatgccatggcaacatcaggaagttactctatatggtctgaaaaagggaggcatgaataatccatttcttgtttagcatatagtcaggaaataaccataaaaatgggcaaccagcagctctcggggctgctctgtctatggagtagcgattctttattcctttactttcctaatcaacttgctttcattttactctacagactcgccgtaaattctttcttgcttgagatccgagaaccttctcttggggtctggattggagcccctgtctggtaacactgtgatagaaagtgttagagggcagagggcaggtagccgtgggttcaaattccttatctccccacctgccctgggcaagtgatctgacctctctgagcccattacttcagctgaaaagggagtgttcgtaccatctgccttgcagattaacttgcggctgggcagtgaggtgcgtagtgcctgggataggactcaacacataataggtgggcggatcctgggtgcagatttaggcctcatgagttttaggtacctagggaatatcacgtcctggtctggagtttgtatcagaggtccagactagagatacagattttggagtcattggcctaaacatgaaacatgcaggcctgggattgcgcatgtgtgttccggggagaggcagggcgtgggcaggagaggaggtgcccatgtggaaggtggagagagagcagttggagaagagggagactgaggcctccagggagcaaaaacagtgggctcttgcatatacattatgaaaaatgtagagtcagaatttatcactcacaggagagagacttgtatttattattacattaacgaggttttaaagatgtgtattggtattcactgattcaaattacgatggcaatttatcattggaggctttaccctgtgggctgttcttaactcgggtaatttttttaaagtgcattgatctctctcccacttccgtggtttcccttgtgatgtattatagttgctgtgtatccttggaaggtgctagggcctgtaaaaggctggtgaagcagtgctcatgttttctctacttggttaaaataaagaaggagtacgcccacgtgtgctggtacgcccatctggatgtgaccttttgttcagttgagctggtaattgcaagtccggatcttgacctcagcctactcattcctaacccaagtccagttcctctccatctgtggggtggtccatgtgatcctggcatagctgcgctattcgtagacctgaattctctccatatcactttgggtgggagatgctgctctcagctccattttgtagatgaggaaatgaatggccagaaaggttgcactgcttgtctgatgggtgagtttgtgcattacatcaggggttcctgaaattgcccactcgtcagaatcactggagaagctttggttgcattcgggattcctgggcctcagatggttaatgccacccacccagtggttggtaagatttggaaaggactaccttctccacaccagatcttggatatgttggtggaaaaataacaataatgacttcttgattatttagatcaggggttatcaaactctttttgtaaaggccagaaaaaatacttgtagctttgcaggctgtatggtctatttcagcttcttaactctgctgtacagaagctccttgacttatgatggggttatgtcccggtaagcccattgtgagttgaaaatatcgtaagttgaaaatgcatttaataggcttcatgtagtgaacatcatagctcagcctagtctaccttcaacctgttcagaacacttacattcacctatagttaggcacaatcatctaacacaaagcctattctataataaagtgttgaacagctcatgtaaagtatcatactgcacatcactagcctggaaaaaacatcaaaatttgaagtgtggtttctactgaatgcttattgcttttgtaccattataaacttgaaaaattgcaagacaattaccagcctaagtgagggactgtctgtatttcaaaagcggccaaaacaaatgaatgtggctgaatttggcccatgggccatagtttgcccaccccgatctagataattagtattatgtatgatgatcagagaagtgattgtacttgccactctccaagggaagtttggacttttataagaatatatcataagcaggtatgggccagtcaagatatatagggtgacagccaggcgtggtgggtcacgcctataatcccagtactttgtgaggccaaggcaggcagatcatctgaggccaggagttcaagaccagcctgaccaacatggcaaaaccttgtctctactaaaaatacaaaaaattagccaggtgtggtggtgggcatctgtaatcccagctactcgggaggctgaggcaggagaatcgcttgaacttggaggtggaggttgctgagatcgtgccactgccctccagcctgggcaacagagtgagacttcgtctcaaaaaaaaaagtgagcaaaggacacagcgacatttctcaaaaaaaaaaaaaaaaaaaaaaaaaaaaaaaaatatatatatatatatatatatatatatacatatatatatatatatatatatatatatatgatgagaattgcattcagttgctcataaaagacccctaaaacattagcttgaacaaattagagatgggtatttctcgtttgttgaagaagccttgagtaactgatctgattataggtttggtgatgtgacgtcagcaataatggaatgacattattgctccttaaggtcatcagagaccccgggacttctgtaaacttgataggcattctgtttctccatctcactccatcggaaacatctatccattcgctaattgaaatgtcgtggttttagtctctagtccttcctcctgttcacagaataatgtgagacattctatggtcgccatactagagtttgaacacataatgtctgtgtttggggttgatgggtggctttcacgtaggaacagaatttatcactcacattagagatgcctgttttcatggtcatagaggttttaaagatgtgtattgacactcatggagtgtaaattacaacagccctttatccttggggacttttctctctgggctgttcttaactcatgtaattttaaaaagtggattgatgtctctcctgcttctctgtttttccttgtgatgaagttgctacttgcccctggaaggtgctaaggcctgcaaaaagctgatgaaacagcccttacattctgtatccccagagtattctctaaggagtcataacttgattaaaataaagaaattctatgtcccagttatgcttatcccatctggacacggcattcggtctagtggggcagatctcagctcttgccccctcccttctttctgaaactgaattccacctcatctgtgtggtggtcggtgtggtcccaggcaccaccacattgccctccaaaccacctttggagcgaggtgctcctctcagctctgttttacagatgaggaaacaagtgtccagaaaggttgactagcctctcaccagcacgctgttagtgctgcaatacacacatgacagcaacatgaaacatgcatctctgctattaattgggctgtggatctctgttgatgttgggaaaatagcatacagtatgttcttcccataacttgcctgatttagtcattcttgcctgtacccatctgttcagctagcactaataaatccctgctctatgccaggaactgggcatccagtggtgtgtgacacagatgtgactcttgctgcagttggttttcatggggaaagcatagccgaaatcctactcctttataataagggtttaagaggaattcacattttctctttcttgacaggtctacatccggataaaagacgatgaatggaatatttatcgccggtatacagagttcaggagtttgcaccacaagttacaaaacaagtaccctcaagtgagggcctacaacttcccacccaaaaaggccattggaaacaaggtaccatcccgtgctgggaagcccacttgtcactgcctgcgttaaaatggattatttattcttcttctttagtccgttgcttaaaaacacatgctccttaaagaaaagttggtggagataagaaaaaaatagagaaaagaaatagccattcataattccaccacctaaagatggtcaccattacgtcatgtgtgtgtgtatgtcctcttatttctctagggcaagaagttggaaaactttttctttaaagggccagagagtaaatatgtttggctttggggactttaccatttcagtggcaaatactcacctctgctggggtcctgtgtaagcaaccgtagacagtacagacacaaatgagtatggctatgtgccaatagcattttatttttaagaatagacagcagctggatttggcctataggttagtttgccaacccctgttctggaccaaaaaatgcttttctagttttcatccgtagttgtcatgatgttcacttcaacttgtgactgtggagtagaactttctcagaggagtttgttgttgttgttgttatatggttattcacctcatgaaggttaatgatttatgatgacccaatttgtcgctgtttattcatcccggttcccttgaggaaggaggtgctagccctctgcaagctcattggttgattaatattattcactcagcagtcattaattgggctccaattgtgtgtcattgtgcaaggggctgggttcagccctggagaagacagacctgggtctagaccgggcttggagccctgtcaaatggtcagcttcagccaggcggcatcatgatgtcactcctcatgtttgtttaggaagcagttctctgtcatggccgtgctttggatcccctggggagctttgaaaaccactgaggactgcctgtgccctacctccatccccattctgattgaatcgatctgaagggaggcctgggcatggaggggatgaatagttctctaagtgattgcactctgcgaccaaactggagaatctttggcttagagtcaagaaggagacaggggcacttcatcaatttcggtatgtgttcaatagcttggcagggacagtctgattggaaggtagagccatgacctttctcaggatgtgtaagacatcgggcattgtattgagcatgatctctctgccatggttgttctcaaagtgtgaccccagctagcagcagcaggagcccttgggagctggttagaaatgcacattcttgggctcaccgtagacatgctgattcacacgctctggggctgagacccagcagtctgggtttaacaagccctctaggtgatgctgttcatgaggaagtatgaggactgccgttctatcttttgacaaagccatgtggcagatgccatatggggcgaatccctagtttctgtcttcaggaggtaccgtgctagcatttccttgacctttatcacagaaacacagagcaagagtttccataacccactcctggcacttgggaatttcatagggaaatctattcccaacccttacatttacatgtgtgtagatttctatgtataaaacagattgaaacctgatcacgccaaggtctgctcgatttgaacataaacagttacaaagcaggtttatcccaggcccagaatacatttgtccttcatttttctgttgaggaaaagtagagctgaaccactacacgtggcagacagaaactctatacttgttcatagcaaagagtacaagaattcttttgaaaagaggggaaaattatatattgatttaatctaatgacccataggctcatacaaatcttgggagttattcagaatgtcctaaaatgtcacaaaacaacatgctgctaaccagcgtattatcaaattataagacattcttatgtgcaagaaacacaatcctggagtggcccttccgtgacagcttcttcacggaatctgcctgtgtcttgtgctaagggaaagccattgtagcacaaggtggaaatgaggggatttggaaggggaaaactcttaggttgtggcttaacattgtcctgacttaacattgtctggggtgagtcgtgacttaacattatccaggggtgcctgggaactgcagctttaagcaaaatgacatattgtgttatgaaatgaactttaccatggacaaatggatacaaacaagagttcagttcctagggcatacagtactgtatttagcttaaagtcttagttagaacctgtcaacaacattaagtcaacacttgctgtgttagtttcctcttactgctgtcacaaatccccacaaatgcagggactaaaacaaattcattatcttacaattcgagaggtcagaagtccaaaatgagcgtcacagagctaaaatcaagacgtcacccaggcctcttccttctggagccccaggagagagtttgctccttgctttttcagcttctcaaggccaccctcatttttgccttatggccttctgtcttcagagacatcactcagccctctgcttccatcatcatagtcacatttttctctggttctgaccctcttcctcttagaattccccttagattccctgtgatcacactgggctcacccagatcatccaaattaatcccccgaccccaccctttgtctcaagatccctaacttaaccacatctgctgagtccctttggtcatgtgaggttctggggatttgggtgtggacatctgtgggggccattattgcgcccaccacatgttagacattgctccatgctttctctgcagcctcaaacaactcccttcccacctcctgcctcctcaagccccccagttacacaaaacttaagacaaaataaatctcatcagtcctgaaaacactggatttgagtttagtgagatgaggctgagctctgaggagtgggagggtttttctggtgttgcatcctgtagaaagagggcatgaagctgtcctgggtctctgctgtgcaggagctgggaactgttttgttgttgttgtttgtttggttttttggaggcaaagtcttactctgttcccaggctggagtgcagtgacgctgtgtcaactcactacaacctgtgcttctggaggagagaactgagtctgcttcatgctctccaccctcatccccaggctagagagacaatctgtccctgctcatcccgaggctgattcctcacagcagcaaacctttctcctatgaagcctgtgtcagccaagcaatgtgcttttatccccccaacataaccctatttgcaaatagacaagcttgagaataaaagacaccatcttagtgggcctggcccagtaatgatcagctggtacaagtgcaccagctggttcttaaccagatttgtggtcctgctcccactggtgggggtggatctgaccacccagttcgtgagcagtcttggggccacagctccatttctcgcctgtgcagcttttaacttttaattaacttttaataagctggttgaactgtgattgtcttttatacatatatatatatatacacacacacacacacatatacatacacacatatacacatatatacacacacatatatacatatatatatacacatatatacacacatatatatacacatatgtacatatacatatagacacacacacacacacacacacacacacacacacacacacaccccaaatgtcaccctgtcgcccagggtggagtgcagtggcacaatttcacctcacagcaacctccgtctcctgggttcaagtgattatcctgcctcagcctcccgagtagctgggactataggcacccaccaccacactcagctaatttttgtatttttagtaaaggcagggttttgccatgttggccaggctgttctcaaactcctgatctcaagtgatcctcccacctcggcctcacaaagtgctgggattacaggtgtgagtaacaggaggggccatacccggccccatgattgtcctttgattccttctttctttttctgtgcatttggctaagacatacccacttccctgaaatccaccttggctgctgctgaggacacatcttagtgattcttcccatttccaaaggaggattgagtcaagattcagaaccttcaacacccaacaggggccactggtgaattcatttcaaggccaagcttatgctggcctcactgggcctaataactcaggacacctgctttaatatcccaagagcaaaatttttggagtgtgttgattctacattggcccagaaaaatccgccacgtcagaatcttttctttgattgggttacttcaaggataactcacttgtccgcctggaccattgtggcacacgtctagacaagacgtgtttgggttgatttaattaatttctttctccttttcctttttctttttcctttttccttttccttttccttttcccttcctttcctttcacagagtcctgctgtgtcacccagactagagttctgtgatgcaattgtagctcaccgcagcctcaaactcctgggttcaagtgaccctcttgcttcagcctcccaagtagctgggaccacaggcatgcagcaccatgcctgtctgatatttcagttttttgcagagacagggtttcaccatgttcgccaggctggtctcaaactcctgggctcaagaactactcccacctcagccacccaaagtgctgggattacaggcatgagccactgctcctggccagggttgattgaattttgcatgccttgttactcttaagccttgaacccattaaatgactcactgcagaatccatagacctagacattattcaaggaaatagcaagcgtagtttagcctttctcatttgtcagatgagtatccttctagcctgaatgtctatatatttcccctacaatgccatcattggtgattgtctgacagttttatagttgaaagtgatcttaatcccaatttgaatcttttttaattgacaaaattagcatgttgtatagtgtgtggacccagcatttgtctttaccaaagaatctgttgctttaatatgccatgcatgtgtgtaattatatattcacaggatacccagagctctccctggaggtgtccatgccttcacatactgtatcaagttcaaatcatgttgaaatagttggcctgaatatcagttcaccattcgatgaagtttattctttcatagctgagtcaagccacaatagatacatattgaagttattaagtttttttttttttttttttttttttttttggagacagcacctgccatcatgcctggctaatttttgtgtgtttttgtagagatggcatttcaccatgttggccaggctggtcttgaactcatgacctcaggtgatccgcccaccttggcctcccaaagtggtgagattacaggtgtgagccactgcacctggccatttacttttctttttttttttttttccagacggagtcttgctctatcacccaggctggagtgcagtggtgtgatctcagctcactgcaatctccgcctcccaggttcaagtgattctgctgcctcagcctcctgagtagctgggattacaggtgtgtgccaccacgcctggtaatttttgtattttttgtagagacggggtttcaccatgttggtcaggctggtctcgaactcctgagctcgtgatccacccacctcagcctcccaaagtgctgggattacaggcgtgagccaccacatctggcccattaacttttatatatcacaggtgtggggtttgtttaggccaaggtaacaattccaagatcttggtgacttaagccaacaagggtatatctttggctcatgttctctgtccatcgtgggttggctctgggctctgctcatcacagtgctgggttccaggctgctggaggctccatctgcatgcatgtggcaacaagaacaaggagtaggggcaagtcaggtggtggcttctaaagctgctgcctggaagtgatacatggaaattccacttgcatttcattggccagagcaagttccttggccatgcctaatgcccagggagcaaaggagtcactccagatgttagtgaccagctctaatgacgcaagctgggatgacgtttctgttgaatgacattgttcagcgggactgagatagtaagagcacagcttcacccatccaaaactatacatgcctgtcccatggactccactttcaaaggagtcgcagttcacctgcttcctgcatccctgcttaagtcattctctctttctccctctctcttttttgcttgagacagggtctctctctgtcacccaggctggagtgtagcggtgcgatcatggctcactgcagcctcgaactccccggctccagccatccttccacctcagcctcccaaagtgctgggattacagacatgaaccactgcccctggctcctgtttagattattctaactccaagccactgtcaccgcagtgtggacacctgcagtggctggcctttttctcttttgcctccctgtagcctattttccacgctgtagcaagagtgagatttgtacaacataaatctgattgtgtcagctgtagattaagaccctccagtgacacccctggtacttacaatggggactcgttactgtggcctcagaggtgtcccctggtagctccctcacctccctctcctaccttatctcatgccctgcccccaccctctccactcagccacactggtgtcctaagacatctacactgatctcacctcggggcctttgcacctgtcacaccctgtacctggaatggccattcccagattcctacatggacggctcctcccattcaccagatgtcagttcagatttgccctccttaggcagaggcctttcctgacacccctcactctgctgccctcagtcactctctggccctttcctctgctttaattttcttcccagtgtataccattgattgaaatgacttatttgtgcacttcaatatgatctgtctctctgcaccagcatggaagctcatgaaccaggactggagtctgtttctgttcactgctctgtccccagctcctagaatagcacctgacataccaagatactcacggtctaaattaatgaacaaacaaacagaaattcagtggaagagtttcccttttattttcttcttcgctttgctgggtgttggcacacattcaaaaaatctcaattccaaaagtgagtacataaactttcaaggtgactcgggaggttgttctcacccgacttttggctgaatattttttgcagagtgggcatgaggccaagcaggcttttggagaccggaaaggtggctttctaatggtctgagggagttgaccggtgagctgcctgtccaaatgggctttagcagcatgagggcttaggtaaaggactcgtttttgatgatgttactaaagtctgcattatggctcagggagcgaatgagaatagagagactgtcattccttcttaggataatagattccgtctccaaaagttcatttggcattaaggcaaggcaaatcactttccctggagccacagataattcaacttgttggagaaattatgcattaaaatcctcattaaaaacacatacacccgtgtgtggtagaggaaccgactggtactcgccgagccgtgggaagcccctttgcaacttcttgggaggtgccattggaaacacagccctcgagacggcagggtcagtggagaggtgggagcgagtggacctcatgcaggaaccagaggcaaatgtgtaccgagtgcagggctgttgtgctgggtgcaggggcattgaaggcgaattaaggttcggtctctgtccttaagaagctggcagtcttgtagggaggatgacatgtaaatgagtcctcaggagctatatgagctgcagggaacctggtgcaatctgcagatagaggagagagaagcagagaaggcttcctgcaggaggcgaaatgcttgaggggccacagggctcccagccagaaatctaggagagggagtaggtgggccagcagaatcaatgcaaggcatcctttctgtacatcccggatcagtttcctgtggcttacaacaacacacatttattctagtacagttcaggaggccagacattccatatgagcctcattaggttaaaatgaaggcgtcagcgaggctgcatttctttctagagactccaggggataatccttctccttgccttttccagcttagaggctgcttgcatttcttggctcgtggccccttcctctgtcttccgtgttgcctctctcccaccattcttctgttctcagatcttcccccgatcacagcagggaagagttctccactttgcagtaatgtgattagattgggcccacccagattatccagggtaatgtccctgtgtcagggcccttaatttcacctcctctgcagtggcccctgtacagtagcatattcacaggttctggggattgaggcatagacactttgggagagggtgggcctcatcctgcctaccgtacacctcttcttccttcttccttcttccttgtcctgggtagacaactcttactgttagcccactttacaaatggggcagcagaggtacagggatgtgaagtgacttgcttgggccatctcgcttggcagcgtcaaggctgatatctgggcccaggcaggtgatctgccttcagcctctgtgagcacagcctatcccacaagaaggtcggctgtagaggatcctggaggctggacgggcagaatcagtcagccgttgcccatttgatggacattcacattaactccctaagtcaactcctcaacctcagtgccgtggagagcagggggcgggtgaggaggggctctgatggcctgtctctccgcccacacccaccgctccacccttgcttaggggccatttttagagttgggagtgctgccctcatagttcatccacaggcttgtaagaacttccctgttaatcctaaacttgtggggtgacagttactcgttcatttatttgtgcatttattctttcaatgtgactttaccaactctataagtaagaggctgtaataagcactgagagtcaaagaaaaagaaaaagatccttaaggctgtactatctgtgtggcctcgggcacgttatttgacctctctgtgcctgtttccccttttatatactaggaatactcatgccacttctagtattgtgtttatgaggattgaaggtggttacatctgtaaagtgctcagaacagtgtctggcacatggtaagatctgtgttcaggtttgttaggtaaggggcattgggctggtagtgaagtggggcgagcagacacacacgtgcgttctcatccccagcgatgccaggaccctgaacctgtgcagtgggtgagcccgacatggatggtcccgccgaaaacctcaaagccagtgtttccatgtacactaacaccagccaccatatgccggcttgccagacacaccgggaactttgcatttattttctcatcatgcagttcttatcaggctccatataaagtgtttatagatgaggaaactggggctgaggggcaataagcatcttgcccaagctcccgtagcttgtaagtgccggagccaggaattgagccgaactctgcaaatgccgccgcaccacccagccctccgtggagaagccagccgcacacgtccatgcccaaatctaggagctggtgatgcagagagtcacctactacaggtttcagccgtaaagttcgtcatgtgaagacaattcagaagatggtgggactccccccacctgttcgcagcagagatgcagggagttcacacaccatcccccgcaactgctagggctccacagagaaatttgggagcgaaaagcagctctgagtgaatgaagccataaactcaagcctgtgtctcatttgacactctgccaaccaccatgtaaatattcctagtacttaatgtattaatcgagaagaagagagaaactgggctcattatacatcccacatttgtgtttctctttaatacagtaaaagcctcttaagatattttccaggagagcaaccactaacgtcatcttgccagaaaaaaaacatctcaggggagagaccttggtgagcttcagactcagaatatgtatgtggaggcctatgcataggtatatatatgtttaattagtgtggtttcttgggaggacttttctataatatcaaattaaaatccagtaagaaaaaaaattaaggtcatttatagacaaaagaatccagagccagccactgaaagcatatttgctgttctgttcccatcctgcatattttctaggtatagcacacagagaagctgaattgaagagactcctcttggtggtctcaagttgtagaacttgctggtcccaccctccattgtggccttcatacctccaccaggaagtcttccctgacttcaaaaacatgagccgcccttccctgggttcatttctcatactccatcgcatcacggttgcctgattgacagttcttccttcccgcagtcccccccgtccccgcacccatgacaccatagaattagagggcagagcctggtcttacttgagtctttgccttcttgggatctgtcacagtgccgggtacagagtcgaacctgtttgttgaataacgaactgaagctgtgtggaagtcattgtgtagcaccggctttgctgggtggttaatttcctttctccctcgtcctatgtcccttcacttccaggacactgtcattcatggtcgttcatagatgctcagttcccatgtggcgccatctcacctgcccgctggacattgaccagctgatacttgcaggaatttccatgaagactctgccttagttgttcctggtgacaaagaaaatttgtttgacacttctggggtctggtgttctcagtgaacccaccagaattggccagcttgccccacttcactcatttcaggctgagttcgaggaccctatttctaggtagaacgcattggttttgtgattgaatgaattataagacaacttgactccgttgggcattaaacgttggccaaagtatttctggggctgtgagtttccttgtatatccttatttagtctctccttccagctctaaaagccttctgaaaagacttaacccgtattctatctgcttttgttcctcacattttcagacaactgattaaaatcacaacttagaagagtatttcttggctcttacccttttgagtagttggagaataattgctacctttcccttcagtattctcattaatatttgagaacttcaaacggcagaaaaacacaaaaaacaaattgagaactgtgtattgcaatcttggttcatctctaacacgctggaaaaaaaaaaaaaattcagcctctcaagttgccaccagttggttatttcctgaagccacctttttggagttcacaaccccaggctggaggaatcctctccctttctctcgtccttctctgcagtgtcatgggccacttgcatctttagaaaccatgcaacacagggaaagagcttgggctgtggattcagatcctgccccctcccacactggctgtgtgaccctggacaagtcctcagcctttgtggcactcagctgtcacatggtggtgagcacactgacagcatgggctgtggtgaagagtgaacaagcttatgccagtcaagtatttcccatggtgcggtgtgtccttagccctcaaacgccagcataaaaaccaggtctacagggaggaagcactcatttgatttcttttcttttgtgattggtgacaactcccacataggcatgcttgcttttcctttctttcattctctcttcttcctcccccgttcacttctctacttcttgttgtgggttttggctttttcttttttttcgagattgcgtctcactctgtcacccaagctggaatgcagtggtgtgatcttggctcaccgcaacctctacctcctgggttcaaacaattcttgtgcctcagcctcctgagtagctgggactataggcatgcaccaccatgcatggctaatttctgtatttttagtagagatggggtttctccatgttggccaggctggtctcaaactcctggcctcaagtgatctgcccacctcagcctcccaaagtgctgggattacaggcgtgagccacaacgccagggcttttttggctgttttttaagttgaggtatagcatacctccaattttaaggtacagtttgatggattttcacaaaatgaacacacctaggcaaacagcaatagaccaagaaatagaccattatcagatctccagagccttgtcttgttaaagggccactgtgctgctttctgataccatagtgtgcttttgcctgtatgtactcctttgtatctggcttctttctctcagcatcacatctgtgagcttcctccatgttgttgcaagtagcaattgttggttcattttcattgctctgtaatagtccattgtgtgaatacaccacagtttatttatcttttactattaatgaatagttcaatgttttctggtctggctcaattacaaatagtgctgtaattaacaattcttacatacttcttctgctggctctgagccctggtttctgtgggatgaaatccttaggaatggacttgctggtcacagggtatgtttatactccactgtagtgcatactgccacacagtgtcccaaagcagccatacggtgatgattttttaaagaaagagaaaaagaatacaaagaataggataccaggcacctgtgttcccaccacaccaaattaacagctgttcacattttatcatatttgcttccaagcacctaaaaaattattaggaaatgtttcaggtgtgccctggaatacacaggaaaatgtaatgaacacacacgtataaccatccagattaatcaatgttaacatttagaaattaaacactgtaaatacagctaaaccctctttgcaccttttctcccagaagggaaccactctgcggaatcattctgtgtccttatattacatatgattatgagagggttttctttttacagcttcacatcaatgatacttattctttatgtagcctttcacaactgctgttcttcaccaatatcacatttcttgagatgtattcatttagatgcagggcattctaatgcattaactgctacacttgccgatagtctatggtgtgactactcagtgttgcatttatgtactctctctttgatgaacatttaggtcgtttgcaatttttccctatttggtcattgtggcattagcatccttgtacacgtcttggtatacatgtttgagactcggtttctctaggttgtgtgcccatgaatgaggttcctggcttataaggtatgcttgtcatcaacttgcctagctcttgccaaattgtactccaagatggcagcaccagtggttcactctcaatcatgggtgagaattcccattgtttcacattcacaacagcacttggctttgttcaacttaaattttatttatatttcaccaacacaatgggtataaaatggtatctcattttgttgctgctgttgtttttttttatgtgacttatttttttttattattatactttaagttttagggtacatgtgcacaacgtgcaggtttgttacatatgtatacatgtgccatgttggtgtgctgcacccattaactcctcatttagcattaggtatatctcctaatgctatccctcccccttcccccaaccccacaacagtccccggtgtgtgatgttccccttcctgtgtccatgtgttctcattgttcaattcccacctataagtgagaacatgcggtgtttggttttctgtccttgtgatagtttgctgagaatggtggtttccagcttcatccatgtctgtacaaaggacacgaactcatcattttttatggctgcatagtattccgtggtgtatatgtgccacattttcttaatccagtctatcgttgttggacattcgggttggttccaagtctttgctattgtgaatagtgccgcaataaacatacgtgtgcgtgtgtctttatagcagcatgatttataatcctttgggtatatacccagtaatgggatggctgggtcagatggtatttccagttctagatccctgaggaatcgccacactgacttccacaatggttgaactagtttacagtcccaccaacagtgtaaaagtgttcctgtttctccacatcctcgccagcacctgttgtttcctgactttttaatgatcgccattctaaatggtgtgagatggtatctcattgtggttttgatttgcatttctctcatggccagtgatgatgagcattttttcatgtgttttttggctgcataaatgtcttcttttgagaagtgtctgttcatatccttcgcccactttttgatggggttgtttgtttttttcttgtaaatttgtttgagttcattgtagatactggatattagccctttgtcagatgagtaggttgcaaaaattttctcccattttgcaggttgcctgttcactctgatggtagtttcttttgctgtgcagaagctctttagtttaattagatcccatttgtcaattttggcttttgttgccattgcttttggtgttttagacatgaagtccttgcccatgcctatgtcctgaatggtaatggctaggttttcttctagggtttttatggttttaggtctaacatgtaagtctttaatgcatcttgaattaatttttgtataaggtgtaaggaagggatccagtttcagctttctacatatggctagccagttttcccagcaccatttattaaatagggaatcctttccccattgcttgtttttgtcaggtttgccaaagatcagatggttgtagatatgcagcattatttctgagggctctgttgtgttccattgatctatatttctgttttggtaccagtaaaatgctgttttggttactgtagccttgtagtatagtttgaagtcaggtagggtgatgcctccagctttgttctttttggcttaggattgacttggcaatgcgggctcttttttggttccatatgaactttaaagtagttttttccaattctgtgaagaaagtcattggtagcttgatggggatggcattgcatctataaattaccttgggcagtatggccgttttcatgatactgattcttcctacccatgaggatggaatgttcttccatttgatggaatgttcctcttttatttccttgagcagtggtttgtagttctccttgaagaggtccttcacatcccttgtaagttggattcctaggtattttattctctttgaagcaattgtgaatgggagttcactcatgatttggctctctgtttgtctgttattggtatataagaatgcttgtgatttttgcacattgattttgtatcctgagactttgctgaagttgcttatcagcttaaggagattttgggctgagacgatggggttttctagatatacaatcatgtcatctgcaaacagggacaatttgacttcttcttttcctaattgaataccctttatttccttctcctgcctgattgccctggccagaacttccaacactatgttgaataggagtggtgagagagggcgttgttgttgttttgagacaaggtctcactcttgcccaggctggactgcagtggcacgatctcggctcactgcaacctccgcttcctgggttcaaatgattgtcctgcctcagcctcccaagtagctgggactataggcgcatgccaccacgcccaactaatttttgtatttttagtagagacggggtttcaccatgttggccagactggttgcaaactcctgacctcagatgatccacccgcctcggcctcccaaaatgctggggttacaggcgtgagccaccgcacccagccctcattttgtttttgattcacattttcccagttaccgataagactgatgatctgctcgtgatttttagccatttggatttcttcttccctttcttgcctttgtgtgtcctttggctatttttcttctggggtatttttcttatttgtttctaggatcattttatgttttctggatgccatcctttgtctacaaagatagagctcccagtgctatgcgaggctcaggtgggaagatcccttgatgcccggagttcaagaccagcctgggcaagacagtgagttcctgtctcaacaacaacagcgaactcttgctgtcccctcattggagtagcaactctggctccattcacactagaccccaccatctctgcgtcctccctgtgcctcctgcgtgcctggcccccgttccctttgcagcccccaaagcattggtgcacacgcttgtttaattgtctccttcctcgctggacttgttttctgggggagcagttccgcatcagactccgcgcactgagagacgggcatggcctcttgcgtcagtggaggctggatttgtgggtattggcatgaaggaacgttgggccgcagattgcattctttcacttgcatccagagtaaacccactccaaagctcctctctccaaaacggggtccagcaagctttaagtgtcctggcagtacagggcccaatctcacttgctgaggagcccatcttctctaccagctcacagccacgttcagcttaaccacccccttggaactttctcatcatttaatttttcagctcttctgccttctgagggaaagtgaagttcttttttgtaatgagttttgaagcttttttgagttaactgcctgatcctcataagctggtgaaaatgggaagtgttttgtgtcacagaggagcctttgatgctggctcttagctctccgctgtgagctgggccgcctttttcctatccgcagaaaataaactagccctgcttcacatcagtggcaccatcttaataagaatggtggctatttattgagtgctaactgcatgccaggcagggtgccaaggactgcctgcgcattctcatttaatctcgtcagtatccctggggccgaggagttagcatccctgcctcacctcatgtgacccctgaagccttcaagctctttcttgcctcaggacctttgcacatgcagttcctttaggatactccatccctcacccttcctggttttctcctctggcaggtctcaatggcaattctttcgttttcttttttcttttttttgagtcttgctctgttgctcaggcctggagcacagtggcatggtctcggctcactgcaccctctacctcccaggttcaagcaatcctcctgcctcatcctcccaagtagttgggattacagacgtgcaccaccacgtccagctagtttatgtatttttagtagagacagggtttcaccatgttgtccaggtctcgaactcctgacctcaagtgatccacccgcctcaacttccccaagtgctgggattacaggtgtgagccaccatgcctggcgtcatctggaattctgtctcctggaagaactgtttctcagctacccagaataagttagttccctccattacatgctttctttctttgccccttatttttttgttttatagcattagcacattttatgaacatagttatttgcttaaacatggtaagtgtgtttgtgtgctggccggcggagccattgaaggattttaaacagggtagtgacaaaatccagtttgtattttggagatatcactgccctgtagaggacagctggatggggtcagtgtggctgggagtctcctgtgaggggaatgtgagagacagaatgtctgcagctggttgggcgtggtggctcacgcctgtaatcccagcactttgggagaccaaggcaggtggatcacttgaggtcaggtgtttgaactggcctggcaaacatggtaaaaccccatgtctactaaaaatacaaaaattagacagatacggtgtcaggtgcctgtaatcccagctggaggctgaggcagtagaatctcatgaactcaggaggtgaaggttttagtgagccgagatcatgccactgcactccagcctgggcgacaggatgagactctgtcaaaaaaaaaatgtctgcaggtttcagtgagcgcagaggtactgagaactgagaggggaatcagcagacatggagacgtggagcctgacttggcagagatggggacttgcagaaaggtcacactcatttgtaggtgactatactatgcagtgtgagcgccctaaaattgtgccttgcacaaagttgtgacacaggggtagtcagctggcaactcacaggtcacattccacccaagtcaggggttgtgtttccgtggtggtggtgatgataagtacgataaacccatgcctgcagctcagggtacacggcctccccagcaagcgaggctggtcttcctctttatctcacgcttcctcgttgcaaccattgtgaggcactcaatggaggctgggcccttcgctggagcacatggtcccaagtcaccagcctgccctgcttctcacacctccttggctctcatggcttttttttttttttttttttttaaacctagtcttgctctgtttcccaggctagagtgcagtggtgcaatctgagttcactgcaacctctgcctcctgggttcaaacagttctcctgcgtcagcctccagagttgctaggattacaggcacctgccaccatgcctggctaatttttgtatttttagtagagacagggtttcaccatgttggccaggccgatctcgaactcctaacctcaagtgatccgcccgcctcggccttctgatggcttttgaatttggttccctgcagggttcggggaagacattttggagcaggtgattttttttcctctgagctttgaataattaagtagacaagggaagagcgtttcagggaggggaaagcatgagcaaagctgcagaagcatgggtaatggacaggttcaggcatgcactcgattcttgatgtccaggtgctcctgcccctcaccactgttgggaaggggtccggagatgagtgtggccttgggtgaagcccaagtgaacaggtagcatggtaatggtaggatccggggccctggactttctcagcagtcgggacctgccctccctgttatctccaggaccaatgacttcagaggactgaacaacaagggctctggggaggacagccacctggctgcaaccaagatcctaaggcatcttaagagttcttggcagaaaggccctgaagtaaaaaagtaaacgaaaagcttcattaatttctagataaacattccttcattttttatttcacaaacctgtattgaatatctatcatacaccaagtctcgtggccttggagacgaataagatacatttcctgccctcagagagttcacagtctcatagggcctccgagtcagtgctatggaggaggttaaattagggtgtgggagcacacgggagagtgtatcatcgtggatgctttctacggcaagtggcaacaccaaagtcaaactatttttaatctaacaagatcatgtattggcttgtgtaacgagaggcttaggaatgacttcaggagtggctggagtcgggagctcagtatcatcagacatctctatcttgaccagtctccttctcttgtatttgctgacatgagaaatcagctgagtcttgcctgttgtatctgttcctgtttttttctctgcctgctttttctcaattggcttccttcttaggcagccacctctctcaaggcaaagatgatcagctgcctcaaggcttccattgtatccactaggcgcctcaggcagaaagagcatattgttttcccagtagtttcagtctcagcactgatgctctgtggcctagcttgagtctcctgcctgtcccaggaccaatcacagcgactgtgattggccaggtcattggttcatccctggatggaggggtggataatttctgtccactctcagacaaggttgattccccaaggaaaggctgtagcactgtcaccaggagaaaaggacatgggtagcaagcaggcaaaatatcaaggggagacagcctgtggggagaagggaaagagagactggggaagggtcagaactgaggtgccaccagaattgagtcttgagggataagcagcattcagctattgaagcagatagacgaattccaggcagaggaaacagcacttctgagagctgagtttatggaacaacgcaacttcctctggcccatgaggcccactgagaagtcagcatgtcccactagcagcaggtacacgtggcagagcatgtgcacgttagcaggtgaggcaaaacagcaaggcagggccagttaccttgtatgcttagctaaggagtttggaattttatcctgaaagcaaaaaaagtggcatggtttttaaaactggtttggcatttaaaaaaaaaatgcttgcttgggaagcagtgtaggggatgaccagtagcaggagacgctgggctagtaaataagtaaatacagagagggctgcgtgcatatcaaggagaacaccatttattcatccattctgcacatctttcatgagcacctactatgtgccagccactgaaaatacagtgggaaattaaacagttaagggctctgtttgcataggcttacaatttttgagtgggaaggagaacagataatgcacacataagcaaacatgtaggtagtctctagtaatctctgaatagcataaaagagattcaactctacatctgtctctaagtcaggtcataggaggcattaacttataaaccaaacagcatagaattttttcaatttgcaaattaaaacaatttttggccactgttgccaacaaaagtaaaattgctcagttctgcttgaaagatgaggatgtaagtagagagatggtaggtttttcagaagctagcagtgaactatcatctaggattgatctgctacttgatagcagaaggggctttgtatgctgggtaatggagccatagctccttttggacagctgcataaatctttttagggagctggaaaaatgagccacccaggcagacctggcattctgcttaattctcatttccacctttcattccttccccttatgccctccgctcattccctcctcctgcagtgggaaatcgcagtagaaggcacaagttagggttctatatgggcattcttcaaactggaacaaccaataaaaaatgtgtttgctctctggggcatttccctcagcagtactgttggtggcaggcaggtcatgcatttcacattgttttggagacttttgcagatgcccccaatgcactgattttggaaataattgaacatcactgttttttgtttgtggtggattaggcttcactgctaagttccaggtgactgacgggggtgccagtaatgccagcacccgagcagggcaagacatagctgcatcttttccagattctcaaggcaagtggtaaaatgaaggcgtcttggggatcctcccttagtctgtgcttaggccacatagctctgcactggtcagcaccaaagacaggtccaccgcagctgtcatttgcctgatggtttcccactctgggtgtgatctgaatcactgggggttaagcatattcacaggatcagaccacaccccagacccggtgaattagaatctctacagtgaaaccccacaatctgcattcatttacttctttatttatttagagatgggatctcactctgtcgcccaggctggagttcggtggcacaatcacggctcacttgcagccttgacctccctgtgctcaggtgattctcccaactcaacctcctgagtacctggggccacagttacgcacaaccatgcctggctaatttttgtatttttttgtagagacagggctttgctatgttgcccaggctggtctcaaactcctgggctcaagggatccacctgcctcagtctcacaaagtgctaggattacaggtatgagccatggtgcccagcctgcatttattttattttaattttaaattttttacagataggatcttgcactgtcacccaggtaggagtacagtggcgtgatcatagcacactgcagcctcaaactcctgggcttaagggatcctcctacctcagcctcctgagcagctggggctacaggcacatgccaccacacctagctaattttttttctgttaatttatgcagcgacaaggtctggctgtgttgcacaggctggtcttgaacttctggactcaagcaaacctcgtgcctcagtctcccaaagtgctaggattataggcatgagccacttctcctggccctgcatttgtgaaaggtccttagataatgctgatggagcttgcctgcagaccaataactgaggaccacccagaaggcggaaataactggccccaggtacacagtgaggtacataggtactcagaaagccagggctgggacttctgacaggagtccgcctctctgtaacctccacgggctccttttgctgtcaaccccatgccgttatgtggatgagcaaagaacacagtggtgaatattttcatgcattggtgccaggctttccagccaaaatgtggcttgagatgaacagtatcaaataagacctcaaagaatgattctacaattttatcatctgtctattctttctcaatatcttaccacttaaaatgtggtctgtgtaccagtgacatcagcctcatctgagagcttgtcggatgtgcagatttcaggccccatcccagacctgctgcatgagaatctgcatgttcacaggcccccaggtgggttgcatacacaagcaagtttgagaagcactgttgtgtgtcatttttgcagttgctatcagattggacccttccaatgagaccctttcctgtctccttcctccccgcctcaccttggtcccctcagtggagggcacctgttgctcacttgtcagattgtcaggctctgagccacgcctgtcatgggcagagtgactgtgtgttatgttgtcatattggggtgtggctgtgtgctgtgttgccctctcaggatgaaacaggaagctcccagctgcaggcaaggctccaggctctcaccgcttctgcctcttcctatgggctcttcattcagatttattcaagaattgtgttcaactataaccccagcactttgggagatcaagacaagaggattggtagaggctaagatttcaaaaccagcctgggcaacatagtgagaccccatccctacaaaaacattaaaaatacaaaaattagctgggtgtggtggtgtgcccctgtaccttcagctacttagaaggctgaggcagaaggattgcttgagattaggagttcaaggcttcagtgagctagggttgcaccactacactccagcctgggtgacagagtgaaacgctatctctttaaaaacaaacaaattatgtttaagacagtggtaggccagacgcggtggctcacacctgtaatcccagcactttgggaggctgaggtgagtggatcacctgaggtcaggagttcaagaccagcctggccaacgtgaggaaacgtcatctctactaaaaatacaaaaattagctgagcatggtgatgcatgcctgtagtcccagctacttgggaggctgaggcaggagaatcacttgaacccgagaggcagaggttccagtgggctaagatcacaccactgtactactccagcctgggtggcagagcaagacactgtctcaaaaaaaaaaaaaaaaaaaaaaaaaaaggcagtggtaaaagatctacatggttcctgccctcatggaattttcagcctagcagagaattttatggttttatttgtttacttattaaacaaataacctgatttagtcccagggtcagttagggccctttacattgagatgtggaggctgtgatccagttaagctaagaagcaacaggcagagtggataccaggggacatgcaggcctgcaccaggccaacactagttatagggtcagggaccttctctctctgactcatgcaggttttactgccactgcaatggaaaggttctagttcttggtgagaacatgggacctgcttagtgtccaggctcaggactgcctccgagctgggcaggcaacatgctccgtccagatgtgcgagacttggaagtgaagctgcaactcaaactagggtctgatgaggcctcctctgggcatttacctcctttgggacagtggcagtgaggggcggtggaggagggcatgggttctggggtcagagtacttgggtttgaatcttgagctagtgtagaccagcatgtcacctcgctgtgcctcagtgtcttcaagtttcaagacggtggcatctcccttacgagggcgctgtgaggattgagtgattcggggaatggcttcagaatgtggccgggcccacagggaatgcttcacagccgccggtggtggtggttgctaggctgaggtaacatttgagatttcctgaccaaaatgccctttgaatgccaccccccaactctgactctcatcagcttccccacggtggccggggcctcattcccagccctgttttacagatagggaaactgaggttcagagtggcctgctctagggctcagcctgatcttctagccaaggaattcttatcctggggtctgaggatgaaattcaagtgattaatggaaaagatttacacttttgttctcagtaccctctacgtgaaacatgaactttaaatgtgaacttagatgacaaattataataggagtaatggtacctcctcctttgtccccagtggaaagcaatcacaggtattttcgtatcacattgcggttgctgcgatgtttccagccatcattaaagctcatggttaaaggtcactactttagaattacaggagcgattagagctgccagtagatcttgttattgaatgtgcctgcaaagaagcactcacgttgctgcatggcagttctgatacctgtgtttaagactatgtgcctttctgccttttttccctaatcccatgtatcttgttttgtgaacttaaaaacatcattctgacaaggggccagtaggcttcattacagccacagggaggaccctcccatccaccacccccacccccagggtcgcctcaactgcacacccccctgcccataccctgctgggtgctgccacccaccactgctgctctgagctgcctcactccttccagttcgtcctccttttccttccctgcgacgttcctttttgtgaagcaggtgctggataaataattaatagggtgggaagaatgtggagagaataacatagctcgtgtttatttttaagcagctgctccaggtgcagtctaggtggggaaagtggttgaggggaggctgctgccgagtggtgggaagaggctttgcagataagcccgtgcactgagaagtcagggtgttggggggcagaatggggctccaggatgggcagcccagggaaggagggtctgtgaccagaacaataagtgggggatgcccagggagtatcaacatttcagtgagaagctgaggaaaactcctagactagcaaagtcgtgagaggaatttgatttctgtgattgaaaagagcagaaatggtgcagcttaaagctggctccagggctggagcgatcccagcagaacggggtctcctcttccttctttccctccttccctctctccgtcactttttttctgtgtaggattcactgtcagagaggctttcttcaaggcagagcctctggcaggcccagacttattatggcaatacccgctgcagaaagagagcttctcctttctaatagtcccagaaacgtcctaagattagattccattgttctgtttgagccatgtgtccattctttttttaaaaaaagttttattaagataaaattcacacaccatacgatttaaccatttaaaatgcacaagtcagtggctcttagtatattcagagttgtgcagccatcaccccaagttttagaaaatttcatcaccaccagaagaaaccctctaccacttggtagtcaccccatcctctcctgccaaaccccagacctcagcccctagcaaccactcatctgttttctgcatctaaggatctccctgttctgaacatttcctatcgatggaatagtataatatgtagtcttttgtgagtggcttcttagcataatattttcaagggtctgtcctgttatagcacataacggaacttcattccttttttaaaagatataattcatgtaccaggtgattcacccctttaaagtctcaaattcagtggtttttagtatatttccagaattgtgcagttatcactaggagcaattttagaatgttttcatcacccggaaagaaactctatatccatacgcagcctctccccatttctccccaacccccagccctaggcaaccactcatctgctttccgtgtctgtaggattgcttgttctggaaatgttgtatacatggaatcatgcactgtgaactcttgtgtgtcacagaaggatcatgtttccatggtgcgtctgtgtcatagcatgtatcagtgcagtaaccccccttatccaaggttttactttctgcagtttcagttacccacagtacagtacagtaagatattttgagagagagaccacactcacattacttttattgtaatatatcgttataattgttctatttgattattgttgttaatctcttactgtgccttatttagaagttagactttgtcataagtatgtatgtataggagaaaagatagtatatataaggtttggtgctatccacagtttcggacatcccctgggggtcttggaatgtatcctgtggataagcgggaccactgtacttcattcctttttattgtcaaataatatttcattgtgtggctatgccatattttgcctattcattcgtcagttggtagacatttgaggtgtttccattttttggcttttgtgaagaatcctaggccgggcacagtggctcatactcctgggaccttgggaggccaagacgggacgatcacttgagctcaggaatttaagaccagcctgggcaacatagtgagactctgtctctacaaaaaatatagaggaaaaaacaaaaagagactcctactgtgaatgtttttgggtggacaaacgtttatcttctttatttcattccatctaggagtggaactgccaggtcatgtggtgtcttagtctgttcaggctgctgtgagagaatatcacaaactgggtggtttacaaataacagaaacttttcattcttctggagactgggaattccaagataaaggtgctagcatattcggtgtctggtgagggcctatttgaaaaaaaaccattgtttccacattgaattttcttggcatccttgtggaaaatcaattgactataaatgtgagagtttatttctagaatttcagttctttttcattgatctaaacatccttatgccagttccttttttaaaaaaacaaatcttattttgtatattcgaggtttgcaacatgatgctgtgggatatgtagagataggaaaatggtcactatagtgaagcagattcgcatagttagctcacgtgcttccttgattactgtggctttgtacaggtagtagctgttggaattgaaaagtatgagtcctccagctttgttctttttcaacattagtttggcttctctgggttccttagtttttatatgaatttttggatcaccttgtcaattctgcaaaaaaaaaaaaaaaaaaaaggcaactgggattttgagaaggaatgacgttgaatctgccagtcaatttgaggagtatcagcatcttcatgatattaagtcttcccagccatgaccatggaattttttctatttaggccttctttatttcttttgatcatattttgtagtttttctatagagtacaggtttcagatttcatttgtttgtttgtttgagacagagtctcgctctgtcacccaggctggagtacagaggtgtgatctcgcctcactgcaacctccgcctcccaggctcaagtgattctcatgcctcagccttctgagtagctgagactacaggtatgtgccagcacacctggctagtttttgtatttttagtagagacggagtttcaccatgttgaccaggctggtcttgaactcctgacctcaggtgatgcgcctgcctcggcctcccaaagtgctgggattacaggcgtgagccaccagcgcctggctagtgtgtccattctcaaaccaatcactgtatccagggggacaacaccctaaaaaaaaagctgggcttgaatcctgcgcctgtccctgtaactggagggcggagtactctgtccccaactacttggtctggaaatgggaagtgggagatgtttgaaaggattattctagtgctcctgacaaggccatgaaggggatgtatgctggacaggcaagagttagaagaagaaaagttatctattataaattgtgagcaccaaagcttcattaaaggcacctcacgtgatacggagggaatagcatcagacttgaaaaggcttttggctatttgattgcccaaaaagaaagaaaagaaagatgaaagaaatcactgagctttctagcattttatctagaggtgatttcttagaatcgtgttcagcaaaggcagcatatcaagggcttaagacaagtcaggcttgagaacatcaactatggtcagggaatggtggtaaagaagacagctgaggaggtggaatctgtctgcctggcctggaaaggttatactaaccacacttccctcccaacccacccaccaaatccagctgaaaccttctcatctttcaaatctctttcctcaggcttgtccttaacgcagtgtgtatctgttttccgatcaccactcatttttgcattcgtttgtctgacaaagctctgaactgcagagcaaagaccatgtcttgtatgcttatcttgtggtggggaaaattattgtactgaacctgtagattattgtgagaattaaatgacctgacaaagatgatgatgatagctaaggtgagctaagtgctcactttgtgttgggcactgcaactattgttatcatccctctttcagaggtgatgagaccgaaatgctttctgaggctgtagacctggtaagtggtgcagccaggattgaagcacagagggtctgactcctggcctgggtcctttcccatcacatcaaagcacttagcacggtgcctggcattgagcaggccctcagtagatgcgagctgctgtttatagtcagagaaggagaagcttgactcctgtctggcgttgctggtatttgtgtgctagccctgtggtcccaggtctggacagtcaatggctaatgcagaatcgaaccctccccaattccgttttccatacatgttggaattgagctagctgctgtaacagatttcaatgccagactctgtttcttgttgatgttactgtttggatgcttgtggttgatgagtggcttgtgtgtagatcccagatctttccatagtgagccttcaccatcccctggggcaagagttaacaaactttttctgcaaagggccagatagtaagctaagagcctgagttgggacatgtctggactgaagctggaatgattcctttttcggccctgattttttactttccttcttatgagaaaactccagaacctttgtctagagtatatagtgctctgaagtagaacgttaaaataacccctttaccttccctccctccccttatccatgtggtttgcattaaactcaaaggtcttgacaggtggcgcttctgtgctctgctgtctcctttctccagttcccagcatggcaccaggcacacggtcaaggccaagtcaagggcttttaattgaatggagcttttgcagacctctcctgtgtaaacaaaggtgcaaatgggacagcagagtagctgggcctggaagccgtgtggacctgggttcaaatcccagctctgacgctagttaacgtggccaagggcaagctaattgatctctgtgagtttcagtgttcttacctgtaaaagggaggtaccgctaccttcttgggaagagtgtttttgaagatacagtagctgccgtattttgagtggtgcctggtgggctgtggcgggtggctattctgtctgtagccgttgtattcacagggaggagtccagagaatcggcaaggtcacgcatccccggccctgctccggagggcgagctgggccccatgcttcccagcgtgtctggattgtttctgtagataggtgcttggccttcagaagcatggaccggtgtcacctctcagtagcacagctcgatgaactgtagcagcggggccgcaacaagcttgcagactgtttttgatggcccattgatttcttttttctgttgcttctggatggcctgtagatatattttgtttgatctgcactgtgatattcaggcatttgaattagctgctagctgatttgagaatggagagatcttgcctaatgatctggatttgcagcttcccttaaaaagcagacagagctggccctgcgagctcctgctctcaaagggctgtggtccgccagagcgtccctcccgctttaccaacgttcctggtgccctctgttaagcctgtggccattgcagtatggaattgtctttggggtgtttgattcactccaggtttcttttatctccaccagctccagggcggggtataaatgccacgccaccttctctctcctggctggctctgaagggtacctgttcctccccagccatgtcctaccctgagggagctttcttggggacacacaatggccaagcagagtggaaagaacatggccctggagtccctacactgtggggtcctggccataatacttatctcctttgagcctcatctgtgaaatgtcgttcaggttggagatagtgtccataagtccctccgctcagttcccggcatccagcacacgttggctggtgctaacattttgtctccattatggtctctctgcccactgagacatttcagcctgtggcctctgcagtgaagaatttatgctggttgtagaggctacaattaaggcagttagaggtagtcccacctaatgccaccactgctgccattaaagcctctgagaatctctaatccagaccctgggtgaccgtcacagttggaatcgagtgtgaagggattcagggcatggggagggcattcactcggtgatcacaagggaagggcaccaggcatgccatctgtcagcccagcgagcccctcagctggtccagggcccacaccacccaagcagttgcttagagggctggggaggcacggggagcggatcccagggaagactgaaatgtagagtgtctgagagcactgggaattcctggttggaattccacagctcagtcttggcttctgaaattattggccttgggagctctttcagggcagaacatgtcggaaccccgtatcctgtctttgggtcccatggaggggtgtcctggcagtaaacaggtgtgggcaagaaaatatctttcctttttgttttttctctttggacctcagatacaaaaatgtgagtgaaaccaagggtagtggcttacacctgtaatcgcagcactttgggaggccaaggtgggaggatggcttcagcccaggagtttgagaccaacctgagcaacatagtgagagcttgcctctcaaaatccatgaaccaatgaatgaatagatccacccctccattccgccacatgagtgaatgccgttcccagctcctggcatgctgtcctcactggtcactctaaagccctgtatttattccctcatgtccctgttctccctgccacaggcagctgctccaatagcctcagcatgtatctgtaaatttgtttccttccagaatatgttgggtgattgcatgtatttttcatttacttcatggcattgtgccgtagtcctcattctttggcttggttcgcccagtgccatgttgcagctccagccatgtgacagtgcatccctgcactctgcctccgggactgttgattctgtttttggagtgtgcattggtgacatctcctttgatgtagcccataccgcccaggacgagaattcctctgggagagatcctctaggtggaattacagggtcatgtattctactgtgtttaatttgaccaaatattgatagattgctccaaaatatggtagttttactgaggggtgtgtgccttgtgctgaagatggatacagggatgaggtggaccgtggaggccctggcagcagatgagagagagtcagggacatctcaacagatgaggccaaactgcataaggaagaggctgggtgtggtggcttaggcctatacaaccagcactttgggaggctgaggcgggtggatcacttgaggtcagagttcgagaccagcctgaccaacatggcgaaaccctgtctctactaaaaagacaaaaattagctgggcgttatggcaccggcctgtagtcccagctacttgggaggttgaggcaggagaatcgctggaaccccggaggcagaggttgcagtgagccgagatggccccactgcactccagcctgggcgacagagtgagactctgtctcaaaaaaaagaaaacaaaacaaaacaagcatgaactagcctttttcctcctctcctcccccaccccccagctgtccagcctgcagtttgcgttggctgcaaagtcaaaagcaaagaaaaaataggctttagctacaatagagcccacagctttcctgccatgggaatcatttgttgtgtcctgctgagggcccatccagcctgtgccaagcaccgtggagggtagaaggagtcatcgcaggtggggtccttcctgtggggagacaggctgccatatccagcccttcttgagcaaaagcactcccccacagagtctcactctgtcgcccaggctggaatgcagtggtgccatttcggctcactgcaacctctgcgtcccgggttcaaggctggggttctgttgagacataaagatgagatttcatccaaccacagatttctcactgtgccaggaggaaagtttttggaactctggtattttggttcaccctatgtgaactgcgggactagttcatttttttatttctgtttttagcaaagccgcaggtctcctgtggtcatgaatgcatgggtcttaagaggcaggacagcctcatactcctgagctcaggtgtggaactcaagcagacgtggctctaagctcagctgggtcaccttagagaagccactgaatctcttggagcctcagtttatgctttgccaaatggggatattactgtctatttcccaaagctgttgcaggggtatgctgagataatggaagcaaacactccacatcgtgcttggcatgtaggaatctggtgataaaggtcctattattgttacgagaaacacgtgtgaggagagtgtaactgggccttcagctccgtgtggagcccttgttcctttcctgaaatagagacatgctttcctccctgtgtttgcagtgaagttttgatttaggcacatcgtcattgtagatgcgcgatcaggttttattttctgttctaacatttagcagtttaatgataccgcgtgaatgctgtggtgtagtctccgagctctttcatgggtattcctctcttgagctgcccagggattggggctatgatctgtcatcccccctcccccgcaactttagagtaagatctcgaaagcaatggggctgagctcaaaacctcgggctgtcccacagcctcctatgggacttgagaacttcagagttcattctaggtggaccaggaaaccactggacggcgttgggcagggcagaggaagtggtcgggccgcatagaagcgactcggttcacagtagctgtgaccgttcactgaggggtgtgtgctttgtgctgggcactgaagatggatacagccgtgaggaggaccctggagggccttgcagcggatgggatgggggagagtcagggatgtctcaacagatgaggccaaactgcagctggttctggcttcgtggtacaggcagcaaccagctgtcccccaggggatgtagggaggcatttgcattggcccctaagattaagtttggggtgtgagcatctccttggtggtgtgaaagtgcccagggagtggagccgtgccaggtgagagggtgcggctggagaggcaggtgggagctggatggtgagggcccttgagtgctctgcagggagcttgaatctccccatcactgtttacgtccatcatggaaggcccagggaaaatatatatatatatatatatatatatatatatatatatatatatatatagttttcggtttttgagacagggtctccctctgttgcccaggctggagtgcagtggtgcgatctcagctcactgcagccttgacctcccatgctcaagtgatctttccacctcccatggggttgttttggagtttgccattgcttcttcacttgactggccccttctcttccgtgggactcatgagcagtactcgagggagacgagcatcccatggatacgcaggcggttgatggattctctctaccatgggtgcctgatggaggctggagtacgtgcatgaaccatagaccgtccgtgctttcagggacaactaggtgctgttcacttctcctcacagggcctggcacagaagtgaagtcaaagagatgtctgcttagatggagaactgaatccgatcccatggactcaatcaatgcctggggagtgagggcgagatggcctctgcagggcgaggcctgtttcctcccctcctccctccttcccagtccgtcaccaaagcacttgtttgggaagtggtggcagagcggagttgctggggtgaaagagtcgatggggccttgcttcccttgtccccccagagggcagtggccctggcctccaaggcagtgtgtccgcagaggcttatgggaggggagtcccaccaagggtgtctttgacatgcatcctgccctgcgtaccccttcctcagttctctcttctcctctctgaccctgccctccctcatcctcccttcctctgaactcctctcccctccctcccatacctttcctccctctcccttgccctgccctactgtgcctgcctttctcctgccctgcttgttttctgtcctcctctcccctccccttcctagtgctccctccccagccctcctgccttgccctcctctccccttctctcccttcccctgcctgccctgccctgccctgctctcttctcctcagccttcctctgccctgccctgctctcccttcccctcccctctactcagttctctttcctcctaccctctcctcttccctgcgctgccttcctctgctctctccttcccttccgtacccttgcaaaacaccttcagctaaagacttcatctctcccctcttctgtccatgcctggtgcgttccaggtggtgatcacctagaaaaaggcctgatgaacaagctgcaggacctgttccagcctctcagccacgccgttgccccgctgattggcccagatgggagcctcaggaccttcctcatgaatatttggggccaagtcccagtataaagattagaacagttttcttttctaaatttgcaattgtattattttccccaaattaatcaggggaggccacttcgtgaagctttgctaacagcgcccagtcagcagctgataaaaggagctctgtgacatttgggaagccaccgctatgagggccaccatgcccgactatttgttgctctcagatgtctctgtggagagtttttaagtggcaataacaggaattgctctcgtcagcttcccaattagcaaccgcacagtgggctccccagaaacaactgctcaggcctgggtgctgggagcccaggcgtcccccgttataaagcagagttcacaggttggcatggatttgccgtggattgcggcttgctccctgcatcccagggtggcaggattgggcctgtggttttgatgagttccacacctcccagctggctaatgcttgaaagaagaaaggcagattttcaatgctccagggataaaacagaggggctttttaaaattgaagactcagagctgttttcagtctcatagaaggaatagctgattctcactctctggcttaaaatgcctgtcactccttggggaaagtccagattctctcatgtggcttcctagggctgccctagctccccctacctcaggcgcctctgctcctgaatcttgtggtccccctaagctactgtctttggcatcttcaggctcctccctgccctggagctgcctttctctcccactgtcgtagagcagagtggatataagggcactggctcaggaatcaggcctcttggggccaattcttgtttctaccccccaactaaggagttgtggacctgggcgcctctgagtatcagcttcattcttctgaaatgggaacatgaaaaagcccctctcttggccagacatggtggctcatgcctgtgatcccagcactttgggaggccaagacgggcaaatcacttgaggccaggagttcgagaccagcctggccaacatggtgaaaccccgtctctagtaaaaatagaaagattagctgggcgtggtggcatgtacctgtaatccctcctactcgggaggctgaggcaggagaatcacttgaaccggggaggtggaggttgcagtgagccgagattgtgccactgcactctagcctggacaacagagcaaaattaggtctctaaaaaacaaagaaagaaagaaagagagagagagagggagagagaaagaaagagagaaagaaagaaagaaagaaagagagaaagaaagaaaaaagcccctctctcgatgggctgctgagaataaatgaaatgatgcttaagcataggtgtgcctagcccagtgcctggcagagaaagcactccaaaaatgttgctagtgacggctcctcctgctgctgctactaataatgatgatggtcattattatgtcacatagtcctgtgggagggctccctaacccccattcagatcaggcaccctgtcctcattctcccctatggaagaccttgtgtagcccttcatcaggcgtgtgttgtggctttgtcacactgttttgtaatgatcgctttgcatgtcttttccagctgactgtaagttccacgaaggcgggatccacaggtctcatttatcttttaactggaagtgcctggctcacagtaggcccccaaagaatgcatgctgaatgaatcaacaaacgaatatatgtgactggagagctgaatgagaggatgaatgattgcaccccatccgcaagtcacccctgaaatagatcagtcagctctgaaatagaactgaaacccattcgcttctccttgcctccccagccgccaccatctcctgcctggatgactgcagcagcatccttgctggcctctctgcttcctgcattgcctcctctgaatcttcaggtgacctccgaagtcacctcctcccaggtgccttcctgtcctagccacccaagccaagtccatctctgtgccagcactctttatgatgtattcacgtatctgcttgttggctctactggatctaagctccggagggcaggggtcacatctgtttgccaatacgttccttcaaggcacggtgccttggacatatgcaggcatgcggcagatagtcactgagtgaaccatgcaggagccagcacaattaacgcgagtgccagtaaccagcctgggcgtaaatctgtaactcgatggtgcaccacgagttaacttctcattcatgtcacagtccactgcagatcaggcagcccctcctttctccacgtgtgggctacatgctcccagagaaaggggaaggggaagcaggggaggggaggatggcagggaatttccttttctcggctaggcctagacgtggcctgccccaactcccattaccttacattaaccataagtcagccgatggctctcgtctaattgcaaggcatgctgggaagcctggtctgtctttgtgcccagaaagaagaaacggggttggtgagccagtctcatcagaatgggtacgagaccaggcgtggtggctcacacctgtgatctcagcactctaggaggctgaggagggaggctcgcttaagcccaggagttcaagacctgcctgggcaacatagtgagaccccgtctctacaaaaactttaaaaattagccagacgtggtggtgtgcacctgtagtcccagctacactggaggctgaggcaggaggattgcttgagcctgggaggtcagggctgcagtgagccatgattgtaccactgcacttcagtcttggcaacagagagatatcccgtctcagaaaaaaaaaaaaaaaaaaaggtgcaggatggaatctcatagccaggaggccttgttgctggagtccttagtagtctagtcaacattctagaattctctagccagtgacaagttcctatatcagctgactccaaagcagatatctcttaagggggctgagctgcctgctactcccgatagacaagacctttttattttacaaaataccttgatgttccttgatgaaaagaaaaagaactttggaaatgcaaaatcacctctgtctgtcacgtagctgacacgaggtgcggctcctggggaggggcccactggggagcgggacatgcgttgcaaagacacacttgtcagaaacaaaccaggaaacaaaattcagggaaatacagggggcggggcctgagcattgcttccaggagcctcgttgtcttgttcacagcattccatcgttttaaaaatagctattcttcatttgatgataactttatcttcttgaagctcaaaataaaattaaccttttctggagggaagaaaaatattcctattaaaattgtctcgagtgttctttttgaaagcgaggcccaactcccagtgccgtctatgaatagctctcaggcatcattgacgatggcgttatggtaggaataccacacagagtgacagcagagccacgggtgggtggcaaggactcattaggcagcccctagagaagtctggcaggttccatacgctgggtttgcctccagtcctgtggcttctcatctgaattttggctgccaccctaggagcccaaccagaaaactcacagatccctcatggccctttaagagctggacattcctcagggggtcagggcccttcctggatgccctgtctcctcctgggagccccatgtgacagatggggcctctgaaggcctagttccctgtcttcactcacttgctccctggtgttcggctctctttggaatcagggagctggcttccaggccagtctgtccactccaccaccagggatctttgttctctctctctggactttcgcaacatcctccaggccattcttcctatggtctgcctggccttccctaattttatcccaacaggtatttgttctctcaacaaatgtgtatggagcctcttgggatctccaggcgctgtgataggctccggcgataaagggatgaaccagacagataaggtgcctgccttggtggaattaccatctagcaagggaggtgggggagttagcaagagtcctgcagtgaaggaatgagactatcccaggaagcaacgagtgctttgaagaaaggagaatgaggactggatcagagagggcctgggcgacctccactggcatgtcccgagaggtctctcggaggtattggcacaggagcgaagaccaaaatggcaaggccttctgggacatcccagatgaagacaggagacatcaggagactgtgtgctggacatgagaagaaacttggggctgctaacatattacaatgttggtgagggtcggggtgggaggtactggggagaaggtgacgtgaagagaggttagcaaggcgtgctgcggccacgcggcaaggttcccatgagccacgctagtttagtcgtgtgtgctgggaggtggacagagttcatgggagccattgaagaattccaactgcagagggtcgtgatggagttttgagagctctctctgcctaagcttcctacaccctactgtcccccagcattgcttctcagtgttgatcagatcagctacctgatgcctcccacctcccgttggctttgttcactggtctacgtggctctgcacggttttactgctgctcacactgcagtcttacacctctggagccgctaaacccagccacaccggctgcctcctgttccagcaagccaagctccttctgcctgggggtttcttcttgcatttgctgttctttccacttggcatgcccttcccccaccctcagggcaccaccttgaccacctgatggccacacgcctttcctccaggagccagctaaagcaccagcttcaggggctgcttccttgcagtgacacgctctctccagccctcctgcaaacgtagatattcctccctgcgaggttccctgagcacctgtgggttccatcgcagcacttgccccagcctgtccctaccccctcctgcacatttaaactcctcgaggaaaaggatcccagctaaacatctgtggatcatcagcacctgtcacaggcctggtgggccatgtcagctaccaggtgctgagcctgggttatcaccaatggggtaggagctaccccatcgctgtcttgcagatgagaaacagagattgcaggggatttcgctgcattcccacagagccggtaaatggtactgcaggtctctgacagcctcagggaatgtcaccttgtgatgtgaagtagatgcagtgtagcctctgggatgcatttctggggcctcggctggtcatactgcctgtgcaaggggtataaatcagggcttgcaaatgcactggcccacggaggctgccaggacggggagcaggctgtcctggggagtgacggtgctatgtggtccgctaatcaggcactcccggcttagcccctacccactggcagggctgctcattatttaaagggaagccagaaatctgggttttatgcagaaatctcccggttttaatgtttcagaacattgctcaggccatacaaaacatacctgtgggtcacagttagtctgtggacctccgtgaacagcttgtggtgaaaatggtggcaccatgtcccccaaaaggtcagaacccaggtgatcgcagggggagtccagtctgaacagtattgcattcaacctattaaagaatggataaagaggtgcactgtaactcgtcttttaaaattccagaagcagcaggcacatttgaaaactcaaacgtttaaacacaggctaggtcttagataacaccaatgactcatcattaattttgttacaggtgattatgccattgtggtcaaatgggaaaatgttgttaatttttcagaaatacacactgaagtatttaggagtaaaatgtcatgactataatttaccttaaaacaccttagcgaaaaggtaaaaatgatgacacaaatatggaaaagagttaagactttttagacaaagtattgtggagattcattaaaatttgtgctgctttttgtcttatttaaaatttttcagcaatccgtgatgtctcacacctgtaattccagcactttgggaggccgaggcaggtggatcacctgagggcaggagtatcacctgagggcaggagttcgagaccagcctggccaacatggcgaaaccctgtctctgttaaaaatacaaaaattagctaggcatggtggtgtgcccctgtagtcccagctacttgggaggctgaggcaggagaatctcttgaaccagggattgcaccactgcactccagcctgggcgacagagcgagactctgtcccgcctgcaaaaaataaaaataaaaataataataataataataaaaaagtaagaaaacaaaacacagtcacaggcaggaatatagccttccatgaattattctgggatcttccacacctctcaggtcacattctaccgagtcctgtgccgcgattcaggccagggtgtctgcacctctagggtcagagtgagacctgagggaaaagtgcctggggcagaggatgagtcatgcagccccacctgcccctgcacccaggtgtcaggcttcctcctcttcacaaggcagatggcttctcctaaagccaacctggaagtagaatctcaaagaactgaaccccgctttggggaagcctggtgtagaggaacccatgggcttttatttggaaggctgaaagttgtcttctgtactggggaggctgtccctgctgcctgatggaaggccctgctcagccacctcctagtcttgaccctttgtgcaagttcctcacctttctgaaattcagtgaccagccttggctgtgctgtagggacacagggcagggaaatctctgagaaacgagcatgagtgaagatgtcacagacatcaatggataaagaaaatatggtttatatacaccatggaatactatcagccataaaaaaggaacgaaatcatgtcttttgcggcaacttggatgaagcaaaaggccattattctaagtgaagtaactcaggaatggaaaaccgaatcccgtgtgttctcacttataagcgggagcgaagctatgggcatgcaaatacatacagagtgataataatggactttggggactcaggcgtgggggaggttgggagggaggtgagggataaatgaccgcatatttgagtacagtgcacactgctcaggtgaagggggcactagagtttcagaattcaccactaaagaactcgttcaaggccgggtgcagtagctcatgcctgtaatcccagtactttgggacactgaggtgggcggatcacttgaagtcaggagttcgagaacagtcgtcactagtaaaaatacaaaaattagccagacatggctgtgtgtgtgcctgtaatcccagctacttgggaggctgaggtaggaggactgcttgaacctgggaggcggaggttgcagtgagctgagatcgtgtcactgcactgcaccctgggcgacagagtgagacactgtctcaaaaaaacaaaaaacaaaaacaaataaaacactcgttcatgtaaccagaaatcacctgtacccgcaaaaattattgaaagaaatcagattttttttttaattccaattgctgccatattggacattcctagagcagaacctggcttaggtttccaggaagcagctattgtgaggagtgagcacttgggagggacttgggatttctccaggggcctctgggacctgggtgagagaggcagattagactcatggatggaattctctaaccttcattttgggggtggggggttcactttccttgggctctgtagcaccaccccacatatagtaggaaggaccatctctgatctctccttattgctttagagtgttttgagcatttcccttccaaaaaaagaaaaatcttcacaagtttttgcagggctgatgagctcctttcttgtcttcctgtagcagagtctatcaagctgccttgagggtttcttgtgcagattaaaaactaggcttcatgagctccgttgggcactagccaggcatcttaaccaccttcccaaggaaaagcatctcattgtttaatggcgggttgaaacttggcaaccaaggagcagaaccagcattcagactgggtgagcagaggctccagcttgggttggaggaccctgggacaaccttgtctaaatatcttctctcattcgcacatagcccgcctcctgccagggtgtgagatgttagccaccagctggactgatggtgacattggagtggctctcagcagtgtttgagagctgccacccctctggaggaaggtcccccaccgaggccgctcatcggaggtggctttggagaagaagactttgttgtgactttggagtggccccgaggggcccctgctggcacagatgctccacgcttccatctcccacctggtgcttgcaagaggcttgctagagaaaatataaggatgcccagtgaaattggaagttcagataaaccaataattttgtagtctaagtgtatcgcaaatactgcatggaaaggtttcgttgtatagaacatactttttgctgaaaaattgttcattgtttatttgaagttcaaatttcactgggtgccgtgtattctcattcgctcagtctgccagccctggctcaaaggtgcctctcaagaaagactcttcttgccatgctcggggccttggcaaggctttgtgggaactcttctcttctttttattctgattttgatttttgatttgtttttattttttagaggcagtgatgtggtttggatctgtgttcctacccaaatctcctgtcgaattgtaatccgcagtgttagaggtggggcctggtgggaggtgactggatcatgggggtggatttcctccttgctgttctcatgacagtgagttctcatgagatctggttgtttaaaagtatgtggcacctcccgcttcactgtcttcctcctgctccggccacgtaagatgtgcctgagtcccctttgccttccaccatgattgtaagttactgaggcatcccccaccatgtttcctgtacagcctgcgaaaccatgagccagttaaacctcttttctgtataaattacccagtctcaggtagttccttatagcagtgtgagaatggactaatatagtcagggtctaactgtctcccagggtggaatgcggtggtgtgatcatagtgcaccgtgcactctacctctcgggcttaagcagtcctcctgctgcagccacccatgtagctgggactacaggtgcacaccaccgtgcccggctacttttttcaattttttatagagattgggccttgttatgttacccaggctggtctcaaactcctgggctcaagcgatgctcctgcctcagcttcctaaggtgctgggattaaaggtgtgtgagccaccacacctggcctgtgggagctcttcaccggggaccagggcacgtgatgctaggtggtttttctcgttgctgacagattgtgactgagcccctgccttgggccagctctgtgcctgcacagggagagcagagacgagtgccccacctgatgtatggggcctcctgggcgaggtaccgaggcccactgcagacagcagtttcctcatctgttacgcgccgtcgtcatagaacattcctcctcgtgttctgtgaggttggaatgaccccgttcctccactgccttctctcagctctttgtttcttcaccttgcttggtcttcggtccagaaggagcatgacggtctcagagaaagccttgtcccggccccgatgctcactgcccagggtgtctttgttacaagccaggggctactagcacagatacacggagcaggattggctatggaatgtgtggggcccaggccaacgtgacagtgtggagcccctggttccaaattaatgagaatggtgggcagtagctcaccacgcagtcccagtgtggaccctctgtgacagcttgggttgcacaccaagcaagctggccctgcccacaaacaccaaccagacacaggggtggggtggggtctgtaggatgagtgagggggttctggatcacagagcccctgatcactgagtggtggaaactgctcagacctggggacctgtgcctgccttctggggccacgctgcacagcccagcctggtatggccctatgggtggggccatgctaccatgcatcctaggttttttttgtgtgtgtgtgagatggagtttcgctcttgttgcccgggctggagtgcaatggtgccatcttggctcaccacagcctctgcctcccgggttcaagtgattgtcctgcctcagccaagtagctgggattacaggaacgtgccactacgcctggctaattttgtatttttagtagagaaacgtggggtttctccaggttggttaggctggtctcaaactcccagcctcaggtgatccgcccgcgtctgcatcgtggcccacgcgtcctagtttttcaagagaatacggaaattgtttattaataaaacctctttcttaatcagtggcagttgttttgtatttcgagaaactcccctgaaggcaaaattaagccggtgctctggagtggcatttggtgtgattgataattacccgctgacctgtgtggtcactggattgatttgtgtctccctcgctggcctgtgaactccacgaaggccacagcagtgtgttcattgttctaccctgacccccagcaccacattcggcacattttggtgccccataaataactgtcccatttgaataggaacacaccagatagaggtcttggacctgcttttcctccacttaataataatatcgtgagcatctttcttgttattacatgtgatactacatgtaagggcttagggaccattcatacgagatagttgctcaatcagtgttggttgcctggatggcgctgatgggtgatcgcctgttctatagggtcatttctgaccaggtgaggaagacgtaccaaagcgaagatgttttgtgtttcctcaggatgccaagtttgtggaggaacggagaaagcagctccagaattacctgcgcagcgtcatgaacaaagtcatccagatggtccccgagttcgctgccagccccaagaaggagaccctcatccagctgatgcccttcttcgtgtaagtactgctcccacggacatgggccgccagccctgccagcatttttttctcggtcgttttggaaggtcagggagcacagcggctctccgtgatgccctgatcgccatgggacccaggcgaactccaggggctgttccaggtgccaaagtggaggttgggtctcagcgctttggagcttctaaagggatgggaagagagcaggcctgcaaatgagcattgttgacttgaggctcacaaagaaacttggggctctgtgattttgtactttcacacatttcgatcaagggaagattaattttctgtacagcccacgggtgctccaaaactgaaacaaattgtgtcagtgtttctcaagcttgggtaatgaacccaaggaaagttctcccagactcctaccagtattgacttaaattatttttatatgagttttacttaaaaatgaacattaatattatttaaatgccttcttctctcttgaaaaaagtaaaaaaaaaaaaaaattaaaagagtttacatattatgcacttagaaaatcattacacttcaggctgggcacggtggctcacgcctgtaatcccagcactctgggaggctgaggcgggtggatcacctgaggtcgggagttcgagaccagcatggccaacatgttgaaatcctgtctctactaaaaatacaaaaattagccagccgtgcaaaaattagctgggcatggtggcaggcgcctgtagtcccagctacttgggaggctgaggcaggagaatcacttgaacccaggaggcagaggttgcagtgagctgagattgtgccgctgcactccagcctgggtgacagagcaagactccacgccccccccacccccccccccaaaaaaaagaaaaaatcattacacttcaaaattgtcaattaacccaacggatgctgctgttttcaagaaagctaatcttggctcgaaatgtcatgcagtgacttcttttcgcctgccacatgccaggcgtgctgacttcatccacccctttgctctggtcccattgctgggaaacgtcaggctgtccttttgacgtccctgccttgccactgattagtccactctgttgtcataacctgggaatgctgacatttacatccttggaattaggggaaccaaaaccatcaagcccgacttggtttttatggtcttcagatgctacagaatgtaattgtattatttctaaaatcttaccgtgatagaaacacaaaacgtaaaaatccatagagaagacctgtgggattgggacttattcgagaagcactgttctgggtcggtgtgatttgtatgaaatgctggggtaatataagagtttcctgtcactgtagctgtttaacggttgttctaatggtgttgctgggttcaaaacagagggtgcatttctgctcccctctgtggggtgcacctttgggagccggcttctgtggggtgtgctcctgtctgtggggtgtgcccagcggtaccatccagatcgacatgagcagctgcctgtcttccctgcctaggccctttgaaattgtctccaagatggttgcttagattttctaattgttccggggtttttgtgagaagacattatagtatcctgctgcctgtgataagaggtgcctttttgtcctgaatagaaaacagtttctagaacgctttatttttcttttcttcttttatttgtaatgccagggactggatctcactgtttggaaatggccgcgatagttcacgtgaggagttctcatcctcttagcggcatccccatggcccagggtgcacgggggaattagcctctcgcggagtcatcacgcatcgactgaattccctggtgaaaactgagttagccagttgttcctaagatactcctgatgctgagagtgtgagcaggaggcgctgccccatccgcaagtcagtgtcccccaccccctgcggggtccacagcccaggcatctccggtccagtgtttcccaaacattcgcgtgccgaattgtaaaaagtgcacgttaatgcgagcctgtcggtgtgacatgaatctcagccatgctggttgccatcagtcagcacggagagagaaaccttttgtgcctaattagcacgcagaacagaacacagggttcgatttatggacttttcaaaacgagaatttcagtgggagactgtggcaaatgacacagtgttgacactggaattttgactacatgttggtctagaccccagttgaaattaaacagctcttttaataaaagctctttggctttcctcactgttccaaatcccacagcccccttctccttcttcctttttgagcaggatgggattacaggtcggaatgtacggattgtttcattttggggtaatgatggatcagccacagccaagccttacccgtgctgacgaatctccatgtgatcgtgtcctttctccatgtgctgcccacagaaagcagcgagactgctgtctcagctggaaagctgagcctgagagatttctggttaaaaaaaaataaaaaataaaaatctcctgcctaaggaaataaacccccaaagcataattattcttataaattttgacagattttctccttggttctttcaaatgttgatttaggatccaaaaagtccatttgagttactgaacgtaaccggattgttcactaaagagagggccccccattttcctgtggatgtcagctttgtgtttcacagcacccatctcatctcgtcttctggagagccaatgaaatctatttcatagtgttgaggaaagtgaggctcaaaggggcgaactggctggtcccggggtccccacccagcacgtggggatcctagggtgtttggcaccatagcccgtgtttttgggatggaggtgggaagcctgcaccctgtggactgagcctgattctccaacttattttatttagccagtatagtggggttttgttttgttatttatttttcttcttcttcttttttttttttttttgagatgaagtctcgctctgtcggccaaactggagtccagtggcatgatctcggctcactgtaagctctgcctcccaggttcacgccattctcctgcttcagcctcccgagtagctgggactacatgtgcccaccaccatgcctggctattttttttttatttttagtagagatggggtttcaccgtgttagccaggatggtctcgatctcctgaccccgttattcccccaccttggcctcccaaagtgctgggattacaggtgtgagccaccgcacctggcctgttatttatttttcttaattcaagtacttgccaacatcaaaaaattagaaggtgtcagataaaaaaatccagacgtcaagcttctttattttgagacaagttctcactctgttgcacaggctggagtgcagtggcacaatcttggctcactgcaacctctacctccggttcaagtgattttcccgcctcagcctctgagtagctgggattacaggcatgtgtcaccacgctcagctaatttttgtattttttatagtagagatggggttttgccatgttggccaggctggtctcagactcctgacctcaggtgatccgcgtacctcgacctccgaaagtgctgcaattacaggtgtgagccaccacccccagcctagcttctcttgaaaaatcagaagaattggtcacagcaccattcccccactctcccacacttggatgccccgtgtccactgaacccccatctcctgttgtctcctgggcactgagccagcatcccctccatgctgtttgcctggttatgtcatacatttgggtggatcacctgcctgcatgactacctggctctggagtttgcagtcctggctcttctccactgctcccacggcccctccatttgaatctgtggacatccacgttactcatgatgcattcggtttgcacactgtgccactgtgtgttctgtgaacagggccactgatcagcttcaggaatggtggtcccattctggtttgggaactgagaaggtgggcaggaaagataaaaaccagtgggtagaaattgcttgtgtttttcctcacaaatattacttaaaactttcagtccagtattagatggaacctgctttcacacacactcttccatttttaaattccatttgacgtgtccatatttcactgtgttctgtaagaggcatcatgacttctaagtaatctgccatctgcacaaatctgagttgaagaatcgggaggttgagtttttcctcccagtctctgtgcctcccgttgcctcccttgctaatgccagctctgaattggaaagtaggccggtgggaagtggggcatttcttttctattttgaactctgtatatcagtgtggcccaggggggaccagagtctactccccaagacaaggaacagatgagtgccagcctcccaacacccacatctttgggaagccccgtgctgtgttcgtcgtctgacatttggggaaggggtggttactaagagacgtgacactttgcagatggcagagatccccggggagatgtgaggtaccgttcgtggagggaggctcggactccaagaattcgctcagtgagactggaccgcaaatcggtgacagcttcagtgatttgccgtgctgtcatttagcgcattattaaaatggttttctgcagagtaatttaactttgggaaatacattatgttctcctgctccttgaggagagagaaagttagggggctggaaggtggcagagtaatgtaggtcacagcacaaattcccaactggattttcagcagaaaacccagtctgggtttcccccgccgccgcccccatttgctgctgcattctctcttagggttgtgaaatatatccattttttgctgaaatatgagctgccttgttctcccagtgagcaggttacgtttagctcagcgatgccacaccctgacctgtgcactgccaggggtcacttgaacctaagctgctttgcaagtcactgctaacaggaagtagcaacttttgacttcccttgttttgtggactggccagaaccttccagactccaaagtcctcagcgttacccagttgccagtaaggagtggtgatgccatgcaagagatctcaaagctgcaggcatattggttaggtgtgtgttcagtaaagtgtccatgcatgtgactttccatgggcaagtgtgtcccagttcggcaccgttccaactactccctcttgcttttccccttggcctgctctgctgacttacatcaaccacttggccctctaaggcaggtgagtttgagacccctggtagccacatagaaagtgcggtgttgattttggagttgctgatagtctttggctcttccactgaggaggaaagtggtcttttaggagcttttagaacagcgcatcacacatagtaagcactgtatgtgtgtcactgtttgtaccaacagacagggagcctcggggaaggagattgtggggagcagatattttagggaaagtgatgaagttctagtgtggaaaaaccctaaaacactacagaaagaagatgaggaagtaaacagcacccaccccatgcacacctacccttgcactcactgtcaagtcttttgtgtaactgcagaaatcatcaatatttatgtaagtcaaatagaaactccactgttctgaaatttgccttcgttttttttttttgttttttgttttttttggtggggaacagttgcgctcttgtcgcccaggctagagtgcagtggcgcaatctcagctcactgcaatttccctcttctgggttcaagcgattctcctgcctcagctttctgagtagctggaattacaagtggccgctaccatgcccagctaatttttgtatttttagtagagacggggtttcttcatgttggccaggagtgtctcaaactcctgacctccagtgatccacccgccttggcctcccaaagtgctgggattacaggcgtgagccaccgtgcctggccacctttcttaatttaataaaactggctcagtccttctgaaaggtaatagtatccaccgtaatggctgtttcataatttatttcacccttgctctacttgaacagttaagaggtttccagatttttctcccccagactgtagtctggaacatctcgatggatacacattttggcaggtagagctacaggcttgatgtgtagaagccattctggcttagagggtatgtgcattttaaatttttcctgacatcactaaagcccaccctctcataccaatttgatatgcagggtttgatctggatcgaaggggaagccactcttcccaggtgtgcagaacagctgcaagaagcagggagccccaagtcatcccctgtgcctggagaacagggcacttggccctatggtcagggcgcactgggacctggggtggaagtcttggtctctgggggctggagccctggcaggtgtgtgaactcagggctgtgctttccgaagagcacgccaggactgggtatagtggatggattgggcgatgggctagggtgccctcaaaatgttgcagacagaaggcagggagggcctgacccagatggccaagaggaaagggggacatgggtttggaaggccctaccaagaggggacgtggggccccactgtctcaggtgtgcagcaccatctgccccgtggtcctcatggcaagggggcagcagcggcattgccattctctgggatgaggacggtgagagttgagtaggtgactaggctgcctgctggggcaatggaaggggagcagcagaagatgccgagttttgaggctgaatatctgggtgcagagaggtcaaggggacaaggaggggaagcccgcttgggagcagatgagatgaaaaggaagcattggggtcagaaactggtctacgtgcatcctgaaggcaggcccagagccaggcgagggcagagtgaacgtcttctaggatggccgcctgtgagctgccttcaggtagcagtttctcccaggcatgcctcaggaaatgtatgtcttctcccctctcacgtcacaagaaaaaccagtcaagaggtcggagagtgtgttataaccgtcctgctgaaaattaagatgtagcaatcacagtttggaggaatccacagcgacagaggagaggcaggagcaggaggtgtcaccacatggagctgcaggtctgggtcgccgtttacaggaaccaggacaggaacatgtgggagagacgtggtcacgatctcattagtcaggattgccttgcactgatgccatgctgtaactgtgtgttcctggctctgtctactgcaaacaatgaatcattcttgcaaataaatactaatatgtttatgtaaattgtgtactttctgtgagtggcattccaagaagtaaaaagttttggaagcacaataagtccttaaattggcattctggacaccagactctgtagcgtcatgagccttgctagcaggtgcctgtgttgtgtggttctttcagcagctcccagcagcgttcacttgtgtttcccagcgtttgtatattcattctaggctgtcgtgttttgtaaatcctactaagctcaatattattaagcaaacagttttagatgtctatgataatggataagtagtgggaaggatgttagtaatagtttaagaataacttatgatttggagaattcctaagaacttgcaggaattctgacttcaccatctgaaatcccagtctgtctgaggtatttggaaacactctttgggatgcgatttcctgatataaaacgtggaattggctgacatatgggggatcacagaggttacgaagtcagggtcaggtgcccagggaaagagagggcaggaagaggtgttggccttggatggaagctggggacagggcaggagcctggagtccatggggcagaggcaggaggaggtgcgaaagctgaagacagcctggtcagcctagcgaggggagccagtgtctcccagagaagccttcccctgcgtgagagagctgcagaatcaacacctagccccagagcgttaagaacagcaggccgtcctcctctgctgccaagttggctgcggacccagggagcgggtggcgcagcacggctgtggtggcatccctgagcccctcgtctgtggggagagtgccaccaacaagtcatcaagggcaggaaggggaaacgatggtgcctttgcaagccacagcccacatcacacctccggggagggacaggttcaactcgacagctctgcttagaaacacggccgcctttgccaggcagggcctctctctgaacaaactggattctggaaccagcagccatctgaggccacagaggacactttgctgctgttttgcccaaagggcagctgattctcctgtggagtgctttgcagaatccgtagcagcttcctggaaagtcagccctagtcactgttcgtgggctggtacctgtggccctgtgggtcctgggatagcttagatgctaagaggctgtttgaggtcatggagtctttcgccccttttgtgatgtgttgatgcatatttccaccccacaggaggtgagacactaatgttgcacctccccacccccatccccagcagtggggttcctggacagacttgtcacatcagagagcagcccgtcagccactgcagccttttgtcctcatttcttactttcttagcctcgtcattatcaaccaggtatattatttggagggaggagacaccccgctacctggactgacaccccaaattggggccttggttctgtgatcttccagcatcaataggcaccccaaatttacctctgtcgactggatgccttggcaaactcaggtgcctgtaggtctgggtgggtcatataagtgaattaagccattgagttgtcagcagggagtggtgtggagtgcagctcataggccccatcaaaagggatcagccactcctcaccaggctgattcctgttatataggactgcagctagctggatagaagtccttgaccttttcaagacgtggcagaaatgcacatcttcatataaaatctgatgtttaagttggttggaaactcctttgtttgcttaaaacatctgtgggccacatggggtccactgtaccttaaaagccttccagggcaaaaggggactttggtgcataagtctgtttaacatgtgaagcagtgcagagtgagggcagcaggggatcccacttgaccccaggggatcgcgatgacaaggtgctaaccaggacagctccaacaccaggcctcagggcagcgcggcctctgcggttctgactgaggtcttcataagagtgtgggctccatgagaaagggtccattggagtaatcgtcgggctagagatgtctgctcagtgcccaagcaccgccggcacacctgccgtctttctccgtgtgggagacgtgctcctaatgagggcctctgtgcccagccaaatgtcctggtctttggagaggtttcctgcacctctcacaccttctctgtggcagcttcttttgcttcttgtcctctgtgtagccagcggctgcactcggttgcctgtagaaagaacgcagattagggaggctttggtttttgttttcggggtttgttttgcttttagcagctcagcaagaaaagtgggtctttggagggcagttgtgtcagttcagggaaattggtcacaggttattagggttgaaaaagaagtctggtattgtcacctgttaaattcaaaaagcaaattccattcatgggtaaaattcacctgaaggagttccctgcagacgggctgtcggaggatctttgattctgcttttcttggcgttgccactcccctgtcactcactgccccttgccctactaaacccaagtggctttctttctgcgtctacccctctggtttttaactaagggcaattttgccttactccccagttccaggcacagctgggagtgaatgcagacatttttgattgtcccaaccatgggggacagtgccacgagaatctagtgggtagaggcaagggatgtactgagcatcctacacctcacaggatggcctcctccctgcacagcagagttatctgacctgaacgtcattagtgtgaaggttgagaagcccagacctggcctgagaagctggctcgttgggtcttataaaaccagctacaaagcactgggactccacagtcaagaaaaagagagagggaggagaaaccaacatgtatttagcacccgccagggtccaggtattaggccaggagcttttcatttctttgagacagagtctcactctgtcaccaaggctggagtgcagtggtgtgatttcagctcactgcaacctctgcctcctgggctcaagcgacttttgtgcttcagcctcccaagtagctgggattacaggcatgtgccaccatgcccagctaatttttgtatttttagtagagatgaggtttcgtgttggccaggctggtctcgaactcctggcctcaagtgattcacccatctcggcctcccaaagtgctgggattacatgagccactgcgcctggccagcttttcatttattaacacatcctttctttgaggttagtgttactgtcccttttttccagatgaggaaactgagtctcacagagtgaagtggccaagccatagtctcacagctgggacgtggcagcatggggagtgtgagctgggtatgcacgattggcaagcctctaccctttgtcactgtcagtcacaccaacatgaagcacttacagagcagtcttgaatatcttcagggctggggctttccaggtcctgcattgtaactgtgggtcctctgtgccccttgtaaacaaagccaggcttggtcacgctcgtcttccaccactgtgtgtctcctctggaggtcctcagagtatagaggccgcagccactgtgtaagccttgccgccactttggcctctcagtgcttagatcggccatgggagccctattggtgctgtccaaggtcctacccatctccccttctttgaggttaattgaagaaagggctagaaaatggggctggggagggttaaggaacttctgagagctttgaccccggctgagaaaaggggtctttgatacctgttcgacacgcactcggagctatcccgttcctaatttgattgcccatgagctgagccctttgtcttcattcatctaacacacccaggatgttttgcctggaccagagagaagggtgaacacagcccagctttggtgctggcactcgcctgtgagcgcagaatctcctggcttagcacacatcactcagaagataaaggaggttacggcttgctgagtaagaacaggatttcatgtttttttcttttttatgcatgagaacttgctgtgacagagttgaggatgtttttctcactagctcgttctgggaagacaggttgagaaattactaatgcagcaggaaacaagccgtactgtcagggttgggggtaaagcttgtttatgactttcacattaaaggtacaagcagaatggcctcatcagtaaggagggcggcagttgtgcaggcttgggtttgactcaaggctatgccgtttactttatcagtgatcctggattagaacctttagggacttcatgcctctattttcccctctgtaaaatgggactaattatagcccctacctcagaaagttgcagagttcacacctagcacagagaacgcactaactagtttggctgtggctgcagcaggggtgtatacagctaatttctgggttccttagatccagggaagagctggtattaagaggtgttcagggggctggacgtggtggctcacgcctgtaatctcaacactttgggaggtcaaggcaggcggatcaggaggccaggagtttcagaccagcctggccaacatggtaaaaccccatctctattaaaactgcaaaaattagccaggcatggtggtgcacacctgtaattgtagctacttgggaggctgaggcaagataatcgcttgagcccgggaggtggaggttgcagtgagccgagatcacagcactgcactccagcctaggcgacagagtgagagagaacccgtcttaaaaaaataaaataaaaagagttgttcagggcatgggggccgggggagcacacagcaagcacattcactgagcatatttaggagacgatgtagatttatccatgtatctccacccacggtcagtccctttcctcccagctgttggtgaaatggatctcagaggctgggactctgggatcttgttagcataaagatgccatccccctggccagcccctaaattgctgagcttagagaccagactgcaaggtgccaggcacacccaaaataatgtaccttcttttcacctcaggaaactggttagtgtggtacatgtttggattttagtatagtggctaagccaaagctctgttagtaaattcctacaggagctcattggcaacttggtgcatgacagaaagagcaagactttgagccaaacagacctgggctcaaattccagctcaactacatagcagccttgtgaacttcacctctgcctcagcatcctcatctataaaattggtgatagtggcagagatttcacaggcttgttgggaggattaaaggaaatattacctactatggagcttctcgaagggaagcaattttgactttgtttttacttctttgttcaaactctcacttcagtcccaaaatgattgagttggcagcttagatattattacagttgtttgccctacttcatgtcttttttaaacattggagcatctgaaacttcactttggaaaaagggaagcagagtaggtatttttggcacaatgacctctatcctatgtggggtttgtttaaacaaaaaaaagtaataaaatatctcctatatcagagaggtgtgtccacagcatataagaagttgtctggctgggcatggtggctcacgcttatagtcccagctttttgggacgctaaggcaggagagtcactggaacccaggaggcagaggttgcagtgagctgagatcgtgccactgcactccagcctgggcaatagagcaaaactccgtttcaaaaaaaaaaaaaaaaaaattgtctgccatttatagaccaaaatcgtcctgtcctgctaaagtataatcgatcttggtgacagctttcttctcagtgggctaagcaaattcacagctttctgcatttccccttgcatttttttatttttgagacggagtctcactctgtcacccagaatagagtgcagtggtgtgatctaggctcaccgcaagctctgtgttctgggttcatgccattcttgtgcctcagtctccctagtagctgggattacagggatctgccaccacacctggctaattttgtatttttgttttttagtagagagggggtttcaccatgttagccaggatggtctcggtcttccaaagtgctgacattacaggcgtgagccaccgcgcccggcctccccttgcacttttaaaatgatgtctgggagtaataactgagaatggttacttggtttggttatcacgtatctcctatgttgatgctgtgtaacatacatctatgatactttgttggtatgtgataacatattgcttatgcgtgaggtgatgggctaggaggcttaactggtcttagctgagctggcttctgtgtctgggaatcagtaggtggatgcaggagggccttgactaggaagaatggaaaaactgggctgtgaaacagaaagatccacagatctttcatcctcctcccaggaccagtgggcgagcctgggcatgtacatcagggagcacagacaggagaagcacacccatatgggtatcatccaagctgtgagcatgtcacatcgccaagggggattacaaggcagaaaccagagtcagtgggagggcactgcaaagtcacgtggcaaagaggggcacagagaacggtagatggggccatttgtacacttgcacagattaatgacctgttctaagtgggagaaagggtggctgtgggcatgtagcagtgctgtgaaatgctaaggcaagtgatataaatagggagaagatagaacagaccagtaattcgagccaaaaccatccatgaatccagaatggggcccagaaagacatcactgtgtattctgggatagggccaagtttaatagattgcccagagtcctacttgcctttactttcacaaaaaatttttaatttacacagtgcaattgacttttgctcttgttcatgtctgtgaatttaaacacatgcatagatttgagtaaccaccatcaccgtcaagatatagaccagttccttcaccctaaaaagctgttttcccctcatttcctttctagctgcaccctcccccacctctaagcccttgtccctccccctctagttttgtcttttcaagaatgtcacataaatggaatcatactgtaagcaacctcttgaggctggcgtctttcagcatgtgtgagaaccgtcaagtcgttgggtgagtcagcagtgtttttattactgagcagagtttggttaaatggatataccacggtttatctagtcataaaggaataaagttgcgttggttccagttgttggcaattttgaatagagctagtggaaacattcaagtgcagctttttgtgtgaacaaaagttttcatttctgtgcggcaaatacctaagagttgaggactggatcctatgctaaatgtaagaaactgcattcccacagcgtatgaggggcccagttgctctgcaccctgggcagcatgtcatactgtcatgattctttactgtggctgttcacaaggatgcagaatatttcatcatggtcttaatttgcattttcctaatgagtaatgatgttgagcatattttcatgtggatgttttcctttaacacatcctctttggggaagtaagtaagtgtccaagtattttgcctgttcttagaaactaggctgtttgtggttttacaaagatttgagttttgggagttctttgtatatgttagatgcaagacctttgtcgaacatgtgagttgcacatattttcttctagtcttcagcttcttttcagtgtcttttgcatgacacctttttaattttgatgaaatttactttttgtgtcccagatcatgcttttggtgtcatgtctaccaattgttagcctaaacccaggtcataaagattttctcctaggttttcctcaaagttttatagctttacattttagatctgcgattcattttgagtggacttttgtgtcaggtccaaggattgggtcaaggttaacctacttcctgtggctgacccgctccccccacccccagcgtaaggtcaagtggagggaggacaggactagaggcattacggggtggccccaccctcttgggaccacagctcttatgattaaagaggaacgttatcccctgtattaatttcttattgttgccctaccaaattggcacaaagttagtggctaaaaactacagatttattctccagctgctgtggaggccagaagtccgagatccgtcttactaggctacagtcaaggtgtcggcagggctggcgccttctcgaggttgtggggcagaatttgtttcgcggcttcctggcagccaccctatgccatggccccttctttgcttcccagcaattactctgggaccctgagattccatggggtggacctaaagagtccaggatcatctccccatctcaaaagcctgaatgtaaccacagctgctggtccctcttgttgtagaagctcacatatgaagacgctccagggatgaagagctgggcatccttggggcaccattgatcttaccgccacctcccctagagtgtcaggtgcttgaggactgctcaaggctgaggcatgagagaaggggcaaaaagaaacaagatcgcctccaccctttctgagcaggagtgcccttttccacttctggacccagagctggagggcttctctgacagccctgtctgttcaccccctgcccacttttggggtcaggctgcctgtagttcaggctggaggatgctacaggggaaaaatggtgagctcactgcgggtttcctgggacagcaacaactggtcatctctgtagtctggctgctatttagtttcctgagttattgactagctgcctcatgcatccactccaggtttgaaagctgacttggaggggagacacagggggaggtgaccttactacatcatacccagacctggaacctcttcctcagtattgtctatcctgaagtattatggaatattggtgcatggagagaaggactatggaaccatgtatcatatcttatcagggagagaatgacaggagcaggggaataccactaacagtggggatggtcagccctgatggaggacttctgagtgccagaattaccttcttcattcttcacagaattccctatgagggcagttaccatgtgcaggctcattgtacagataaagaaactgaggctcatggaaggtcatcaatgtctcaaaggacccacgcttagtgcttgatggagccaggatctcagacccagacctctgtgatctgagtcccaagtcataaccatttcagcatgtagttgttcatcagcctcccttttcaagctgccaaattgctctccatgccagacctcaaccctgaggtcacactctgggccacatctctgtcggggtccatcgcatcttcgttcagccagctcctaatgcagccgtgctgacacccgtttaccactaccctggggcgggagtgggttcctgattcctgtcacctcctgtcttttccgtactgtgccagccagtgcctgatactgacctgcgtttccaaccccctggaatggaaaggttcagagggcaggaaccaagctcgcctcttcccctcttctcccagctttgtagcacatgcctggaaaccagtcaatgcttgatgaatgtttatgatgatgcaacagatgttttccactgattgcccacggtacatcctgggcccacacaagaggacgctggatccacttcagagacttggcttgtcttatgagtccagaagggctcacgtttgcagcaccgctctgttttttctttttttaattagtttggcaaagatattcctagtcaccagttagtccaaatcctgcaatattgtctcttcccaacggatccctaaattgagccagcatttccaattcagcccacgctacctgggctcctgctgggtgtcaggccctgtgctaagccttttccacacagggtgtcaaggaatctgcaactcagagggataggacctagtgttattccctttatagatgaggaaattgaggcatggagaaatggaggaacttgcccaagatcacagctagtaagttttagagctgctgttagagcaagagattgtctcaaaagaaaaagttagacccaagttctatcacccagggtggagtacagtggcacagtctcccctcactacagccttcgcctcccaagttcaattttgtttcctcagcttcccaagtagctgggattacagggacccactaccacacctggctcatttttgtatttttaggagaggcagggtttcaccacgttggccaggctgatcttgaactcctgacctcaagtgatccacccgcctcagcctcccaaagtgctgggattacaggcgtgagccacggcacccagtgtgggtctaacacttaaacttgtgtttgaaggcagcgtgttgggaacatggactttggggccaggctggtgttggtcccagtcttttactcttaaatcttgtgcatataagcactagactatcactgccttttttttttttttaaacaaagtattagttaaatcagcaagtaagtgaagttaaagcatcctgtaaggtgtgtggacccatgagcagtactcagaaatgctaaatgtctgagtctctagaggtcccagaaacatgatttgagtagggaatctttgcttagcaaaactatagagccctacttcaaattagcttgaagcagaaaagaagtacttactactcctgtaactatgaagtccagggacttggctagcttcaggaatggctggatccagaggctcaaaaagtgtcaccaggaccctgttggtttcaccctcaagcatgttctgtctggtggaaagatggatcctggcagctgcgtatcttatagatggtttagatccaggccctgaagcataagtgttctcatcagctcctgtagaagtcctaggaaaaatcatattcatcacgttgctcctgatagctgtagcggaaattctagagattctgaatgatgcagctctgggtcatcagcgcatgcatctgggtccgtgcctgtggcccggggaatggagcaccttgattagccaaatctggggcagaggagcagggtgttcagcccacctaagctcatggactgaacatgattatccagaaggagggggcccgattcactgaaaggagagaaagtgggtgggcaaacatatgttcatgctgcggggtctggtgaacagctgtcagtaaagccacagccacctgtgctggcgagtcattgtgtaagaagcttgtgacacctttggcccagacttccacgcccactgagccacgagatcacgcttccgtggtgcgtcccagttcatcctccccgatggagtgggcagtgccccagtgctccgcagctggtgccgtctgtctccagacgctcttccagcctgcattcaacaagccagtcgtatcagaaaatattaaccacgggaattaatgaattttggcattgcagtggagttgactgggggagattttccaagtttattttccaagatgtatctggtgctctagagatttctcccagcccatgagacagggacaccttcgtatttggaagagagaagccagtggtggaacatcctcttaccacactacaagagcttgcgtattccttcatcctggattgccgaaggtggaatccggcaccctctcgttctaagcgaggagcctatctgctgggagaaatggtctcagccaaggtcacaccatgggttaaatgcaaaagccctggactctagaccccgttgactcatcacattgcaaagccacaggaatcacattggtaggggtagaggtctttctgcagacttggttgtggaaggctgttaaggaaaacaagtccataaccctatattcaccggcatcattcctaagaacacgggatgggaatcggtggtgtgcacatcagccaaggcttcagaaccgtgacagccggttcctcaccacaccaagattgaaactaacttacccagattgcaactcaggactttacactctcagtacggcatccaggccacaggggaaggtggaccccaaagtcatgaggcaggaaaagtcagtactgttggaaaggagaagtgatgctggggagtggaaggcgttgtgaggtggttctgctaaaacattatgtcagctggtgggatttggacgtttctctttctctaccctatctcattctgaagaggccgattttatgattggggtcggctggggtctagatggcatttttctgtggggaattgtgtggcctaggaacattctctggaatgttacagtgatggattcattgttctgcaggcatttcttaatgagttgtcactcctgactctgcgtcatgccttgggatcggcaggttcatgtcagactgtttacttctcatgaagcctttgagagcgctgtcactcgaattctcttcctccaccatccctttaataggaggggaaacctcggcccagagaggtgaagggacgtgctctgggtcgcacagctggtaaactgcagagccaggattctagagaccaaactcttgaccactgcttcagcaagaactccttggggaaatgcccacatgcagccagtgtcaacacagcccctggcctgtggtcagtgggccagtaatcaatagtcattagatgttatcatcatcccttgttcactgtatttccagatgaggaaacaggctcagagagattgagtaacttgtcctaggtggcacagctaggaagcagcagatgtcggcttcagtagccaggtctgtgatgccctgctcctgtagcatagccacgaaatgcactgtgccagccatcagacccaggctgcagtagccagctctgtgaggccccacttacctagcacagctatgaagtacagacactctgccagccgtcagagaaacaaatatggtcaatacaaaaaaggaaggggtggggcaggcaatgacagggaaagggcctctgttctcaagtggctccaaagagtactgttgagaaattggtttgccacttcgccctctttacatctggaagactcgcatccaccagagaaagggtgtcacatagttccaagtacatacagagtgacaacccattgtcacacaataggtgtattgtccgcttcctaaccgggtcctgcctggccccacccctaggattgttccttccagggcttgtggacggataggatgccagtgactctcctcctgcaactgtggcaagaccgtgtgtcctgtcagagtgggtgaccagggcctttgccagcagacgacttatggagaaacgtttgagtagatggaggaacccatttcctctggaatccagaggtacagaaagcaagggtctggctcttttcttctgttctgagtctacactatggcccttcccagcttctaggctccaggttaaggggagtggctggtgcaaggtgggtggccagagacgaggtcaccatgaagccttcagattttaacctgagatggagaggcagcttttaaacagtacctttcaccactaggcatacaggggcctccctactgactctccagacctgtgggggaggggagcagatcacctctccttgagagggtgagcctaagccgtgggcattggggtggggtacctggagcattctaggtgttcggggctattaatatttatgtattatcctgacaactaagggcaggatgtgtgcttcagtgggcactgtagtttgaacacctggatgccaaaaacagaaaacaaaaaaacccacacccttgagtacacatgatgggagtgaagcagtcctgggtttgagtccccagtctctcacttcactgtgtgactttggacaatgtattctccccatccacaaaacagagctaataacctccacctggtaacatagggatgggcactggtgcagggaatgtaaagtaacgagggacgtaggaggtactcattgctgtagaggtaaacttgacctcttttcgacccttcgtacaactgtattagtccgttttcacagtgctgataaagacatacctgagactgtgcaatttacagaaagaaggtttaatggactcacagttccatgtggctggggaggcctcacaatcaccgtggaaggcaaggagcaagtcacttcttaagctctttgcatggcaccatcgatgtgagctaggaaactcttccttatgaaaccatcacattcactgtcagaagaacagcacaggaaagactcgcccctgtgattcaattatctcccaatgggtccctcccatgatacatgggaattcaagatgacacatggtttggctgtgtccccacccaaggataatacaggtggaacataaatgccagattgatctattgataattataaacaattaccaagaagagtggataaatcttcctttttgaatccatctagacccactgtgattaaagctattattttgactagaaaactaagaagataggagaaaattagacatttaaacagctaccttccatgcaacaaaggaaattttaaatacagacaattaggattgctttcaaaatatatgaaaataaagggattaagattatacagtcaccagtaagatcaggctggtttggtttttccagggctaggagtgcagctggaagccctaggaggatgagagcagggatgaagagaaaataaattccccacccctccatccacccattcctccaattagtacttacagtgcaccatttcagatcctgatagttcaacagcagataaagcatctgttttcatgggggacacagacattgaatagtgaggcagacatgcctatgtgaggtggcgatttccagtgaaaagacaggaaatgacatcacagtcatcacagagggaaagaagcctgctggggatgtgctgtttatggtctaggaagatgacagggatagtttgacccgaagtggagacctgaggcagggagccaggcagtggacacagcaggtgcaaaggtcctgcagccttgaagagttggcccctgggagaaacagcaaggaagccagggtagcccaggaacagagaggccttgcagccaagggaactctagctgccatgtggagtcagcaaagggtagagctttgttatgggtgatagaacaggtagttaggggaccatgtgggcaccccggggagaggggatggtgcctcaggcagcctgggaaggggtattctcaaagtagaactaccagaacttgctggtttcaatgtgggtgtgagagaaagaggaactggaagaacagagtcctgagctgtggttaacatccccctccctcacgaggattaaatacacccccacgaagtcagcctcagcaccactaagctgtcccatgggatggagatatgattcccaccccaagcaccatctcctgtaataaaacctggcccccgcgttcctgtctgggatctgcatagcatggcacccatcactgcccctctaagcctcctcctgtgaagctgcagctgctcacacttgcctggctaccgaacagaatgggctcaagaatgctctgcagggacagccttactgagccccagattccaaactggagtttagcaaaatgagccacttccttcagcagcagttctagggctgtataggagctgctcttaggggttcagggatacctcaattcccagtctgccctcaaggtgctcagtcttttgggagacagcatggcacaggggtctcgagtgaacgtggcatcctggacttttgcactgctcatattggtaaggcaagcaccacccctggcacacacacggtcaggcatgacataaaaagatgttgctaagggacattgaggtctatttcttgggacaagtaggaattttctatccctgttcattcttcatcttggccacacacatttgctctcttgctcatcccacagcgcctcccacaaggccacgctggatcctgccacagtgttaggttacatttccttccttctggctcaccagatgtggacctgactgggaaggctggaagctactgtccctggagccctactctcctggcttggtgcctccatggggaatgacagtgggcactctgcacccacatggaagggagtcccacaccttctaaggtctcctttgtaacctacctctggctccccactgtgccacatccctgtaccatggcatctgtgtcttttggacagcaccgggctttcaggatgactagtcagggttgtcttgtctggaccagatgctttgagggtgcagccttctgggaattccctctagggattttctatgatgctggcttccctgtaagtcccactccaggcccgggtactctgtccaagccccacagcagaagaggctcttcaggggcctcatttggtgtcaactcagcaagaagtgaagtttaaagcccagagcactgcagggcattgtactggtgtaggaggggtacatccagggctccaaggtgttttctgtgctgagctcatctctcatcccccagccaccacagtgctgggtcatagctgggctgttgttttcctatggcaggcccagccctgtctagctctcagttcctctgctctgcagccagggcccttggcctgaaccctacacatagcagcactcactcgggctgtaggtattcttcagtacctgctatggcctggcatttagggaactctcaagcaacagcacaagtgaggcccctgctctcccgtgctttgggtccgttgtaacagcataaaaagcttgtggagtatcttaggtgagtccactcttgcagctgggcaggcatcatagtgttcggctccctgttacagtgtcatttcttggggacatagcagatggaaaattctggggtagttttgatttagcagttatcacatttgctgttcatggagtgtctgcaggggctaggcacccctcacgatgcttgtgtctgccagccatggtggctcatccctgtaatcccagcactttgggaggctgaggtggtagatcactcagggtcagaagttggaaaccagcctggtcaatatgacaaaaccccatgtctaccaaaaatacaaaaattagccatgggtggtggtgtgcacctgtagtcccagctactcagaaggctgaggcaggagaatctcttgaacctgggaggtggaggttgcagtgacctaagattgcaccattgaactccagcgtgggcaacaggaagatcctcacacatacaaagatgttcatgccatttttcatcctctatctcaaatagccagtaaggcatggagtgggcttccaccctgggaccccagccctaagacctgcacctttttctactccagagtccttgccctccacacgctctgtaaagagcatagctgccgaaaccagcttgaggcagtcccaaggcccggcatcttgatgtcgcagatgctgcttggggccaggagagtcaccctacaaagtgtgttccagcatttactttgagacctgttggtgattagcaggtgatttctacttgcagacaaggcccatcatggcttctgtgccctgtgtggccaggccttgcctccttggccgcatgactgtggtgaaacagccaaagatggttcagactagaacagagatcagaaaatgatggcccacaggccaaatcttaccctccacctgttttttataagtaaagttttattggaacatgcccagtcattcacacttcatgtatagcttcttattataagggcaaagttgagttgtaactgagatggaatgcctccctggagcctagtatgtttagtctcaccctttataggaagtttgccaacctatgggctagaatactgaggctgatgtacactcacatgtaaagggaataccttccataccgcatgtagtgatatggaaaaaatctccatgacattattactaagaggataaagcatggaagagtaccacacaatacctttctaattttagaaatagcaaatatgggccagacacagaggcttatacctgtaatcccagtactgtgggaggccaaggtggttgggtcacctgaggtcgagtgtgagaccagcctagccaacaagaggaaaacccatctctactaaaaatccaaaaattagccaggcatggtggtgcacgcctgtactcccacctacttgggaggctgaggcaggagaatcacttaaacccgggaggtggaggttggagtgagctgacattgtgtcattacattccagtctgggagacacagtctcaatctacaaaaaaaaaaaaaaaaccaaacaccaaatatgaggatatatacttccaccggtgcatacatacgtgcttctatgtgtaatgtatacctgtagaaagacacattaaaaagtaaccgtcacttagtggaggaccaaggtgggaagactcactttttcatgtattcacccccctcatgctcttattctacactcctgtgttgcctatttaaaaaaggtgataaaatagttgaaaaagtgtagaggctgaatagctgagataaggaagagggagccaagaatatgtgttaatttacctttttacagatgatttttgagcagtattttcatgatagactttctgggaggaaacctgtgacgggaggggaagctcagaattgctggttttatttaagtggaaataaatttttagttgaatcataaaggtagaatgggcttagggcacaacaaaaagctgtttctcaatctaaatatttcttctctggccgagtgatgggcttctaaacaaggtgtcatccagatgaaggaagtggggtgttttcatctccatgtgatcctctctttgcttggatgaaatctggtgtgaaataatggaacagtggtccacagctgccaggagaatctcagaaaaccctcagtaccatcgtgcagacttccccacagagagcctttaggaacacactgcactcagatttgccatcttctgaggacagtctaaaaatcactgctccggaggttcagacaccgtcaaatgtttaaccagtttgtcagcccaccaaaaagccacttgtaacctcagagatatgtggaatcattcttttgggggctagtctttccatttgcagaacttccccaacagtaggattgctttcaagttggggtctcagccacagcttgcacattcgatcacccagcatgcttttaaaaatacagaggccaggccctgcctggttaatgcaacattaatctttgggcctcagcatcaggatctttttaaagttccccaggtaattctaaggtgcatgcaaagttgagaagccctgctttcaaaaggctggaacaaattctggtgttacaattagatctgagtctgaggcatcaacccagcaagtattttctgagctttggtttccgttcctgtgcagtaggataaaagtaccaccctcctttcaggtggtgagccaacttgtgaatggggacagctgacaagaaatacttcctggctgccttgtacacataccaggggcccgcttcagaagcacatgggcatcaaacttctgtatccccgcctcagttttgtcacttagctgctgctggggacacaggagcaggcaggtgatatttctagcctgtctgctcatctgtaaggtagggatctctataccctaccacacagagccactgtgaggatccagtgagattccccagccaggctgtgcccaacacagtgccatgtcaaagtagctcctgctggtccctgtctctaaaaaacgtggcaagtccaggctcagatgggaaggatttttggggcactgaatctctgtctcaatcactcaactgtgctatcctcagtgagtgtaaccatggctgatacggaaatgcctgagaggccacattccagtacagcttaatctactaatcctgcagaaagggaaacaacggcagataaggcaggggagggccgtggagtcagacatccagcaccatgccccagctttgcctcctaggggctcgtaagccctggccagttaacttctgtgcctcagtttcctcttctagaagaggtgataatggaactcctctcctggcttctgtgagggtttaataagccaatacacgtgtaagacagcaagcatggtacctggcgcagagcagtggtgaggacgtggtcagttcttttggctcgagagctggagtgaaatacctcgggtccatctcatcacccaacgattgggcctcaggaatcttgctcaaaaatagcctgccaaatgggccttcatttctcagtgatgtccccagcactggcacacaggccagccaagttgctgccctcatggagtttatattctcatggggatgactaaaaaagcaaaaaccaaacaccaaacaaatggaaggattgcaatgggagacccaggccatgcagggcgtttacaagggtcgggggaagatttagattgggggactgatagaagagacatggtatctccagtgaaatcacttctgatttaaggtatgaattcatctcagctctgggctttcagtcatcctggaggagagaacagccaacagtgtgacacctgacctgccagagaggagagggtgtggcagatggcagggcctggggagacatggacatggaggcaggagataggcaagggcagcagagctgattgctcctggccttatatgccacgtcatcaggaacatggattgtattgagtgcagcaggcactgtctgaggggctgaaatcaggagagtgggattagatcagctttaagaggctggggacactaattggagatggtaactgcaaagcaacactcacctgcatatagttcaggcttggcctggggctttcaggctgggagggccttgggcttctggctcacagctctggggtccttcctgggatttttggatctttaagtcagtatacagctgcagttatttccagtagccatgctcgcagatggggacttgagaatacagagagagattgtacaagaccactgccgcctaggggcacagagtaagaggaaaatgagtgggcacctggccctgggaaacgccctaacaaggcaggcagagaaaccagctcgtcttctcagagcttgccagacatgctctcaagttgaacatataagtagttctggtggttgaaaaccaggtctgacacactccaacctgctgagcatggtgtagaccagctcagaccagccccagctgcttagaccaggcagggcaggtgcacacttgccatcacagtgctggaggagggaccccacagagcactgcagggagctaagcaggagctgtgggctctgaggatgctttgttccccaccccccacccctgcaagatggaattttgtgcttgttgcccaggctggagtgcaatgacgtgatcttggctcactgcaacctccgcctcctgggttcaaacaattctgcctcagcctaccacgcagctgggattatatgcacatgccaccacccccagcctagtttttttccttaagtacagacagggtttcaccatgttggtcaggctagtctcgaactcctgaccttgtgatccacccacctaggtctaccgaaagtgctgggatttcagatggagtctcactcttttgcctaggctggagtgcagtggcatgatctccgcctcctgggttcaagcaattctcctgcctcagccacccaagtagctgggactacaggcatccaccacatttggctaatttttgtatttttagtagagacagcgttttaaccatgttgcccaggctggtctgtaaatcctgacctcaaatgatcctctcaccttggcctcccaaaagcacttgggattacaggtctaagccaccatgcccagcctggatgctttgctctttactgtgtttaagtaaatgagcaatgtgtgaataagttctggcttaaaccatttgaacgatgagcatatatagagcaaaacgtgaacatctccctcggctgcatcgtctctgccttttggtgcatctgtgtatacatgggtgcttgcttcatatgaggtttcagttttaactaaaatgggaccagatgtcttttgttctgtagcttttcccttacctgtgtcttgaaggtgtttctgtgccccgtgcatgggtgtgcatcgtcttctgtaatgtcagcgtgtcctgctgtttccgcacacctgccatgccaggtccatgggtcctgcacataggcatggagtggtttccaagcttcctccgcagcaggatgctgcattgaacattctcgcccacgtttttgtgaacttgttcaacaatttcttaaagctgacaccaagacttggagctcccaagccagaggagctcactcacacatacctgcctcagtttccccaggtttcaccagtttgtgcatttgctaaccacagggatgccaattctcagcatccctgcccatgcctggtgacagctgtctttcagtctttcagtttgcattttccttaagtgtattagaacgtgctctctcccccgccatagaatgcaattgtttattctagaaatttgtattgagcacctgctctgtgccattctttccgtaggtgccagggtgctcaggaaagaggacaaagatatgtcagcatgccatacaggacaggcagtgcaggggagaggggctgaggagggcagcaagcacggcctctggagaaaacaatggaggtggtgaggggggtcagtcagccggagcacctttctttcttgcagaggcaggcaggagtgtgcctgcctggtgccaccgagcagcctcaagaggctggttggagttgtggggaggtggaggaaaagtgaaagggccaatcagggacaatctcagagtatcaaaaggcttattctcagacttggtccaggagtgacagggtctggcatcagtggggttactcaggtgtggcatgcagactggactatgggcagctgctgggtacagggagaaatggaggtgagagatgagggtgctcaaacccagggtatgacctcccagagagcaggggtgctgtccagtcaatccctctcatagccccagtgtttcttggcacctgagaaacatgttggttaacttttctcccatgaggcgctccctgtctttccctgcgtgtctgctgggctgctggcccctcaggttgctttgtaggagacactcatgtacgcagggtgtttccctagttgacatgtctgaggacgtctttcgttgtggggagtcacgcagggattgactggacagcgcccctgctctctgggaggtcataccgtgggtttgagcaccctcatctctcacctccatttctccctgtacccagcagctgcccttagtccagtgtgcatgccacacctgagtaaccccactgatgccagaccctgtcactcctgcacgaagtctgagaataagccttccgatactctacgagattctccctgattggccctttcacttttccttccacctccccacaactccaactagccttcaggctgctcagtggcaccaggcaggcacactcctgcctgcctctgcaagaaaggtgctccagctgactgaccaacccccctcaccacctccatcattttctccagaggccgtgctttctgccctcctgttcttggtctcaaaccttatttttgcgtatggtgtcaggtctgtttacatcacaccaacttgtaacaccatctgcgtggctttcaattttcaagtgttttttttgttcacttgtcctgtggactcatgccatgccaccgtagtgctgagtgacgcttaaagggtgcttttcttattaatcttatagaattaatttctgctttcattgagaagtatgggttattactcttatgttctcaaagtgatggttggagtggttaaatcgctttgtcgccatgacacatcccagatgttgctgagtctgaaatgcaacctagggtcttccaattgtgaggttggtttcatggcgtcacaccccacctcactaaagctggcaagaaatccgaggtcctgtggggccagcgggcattggtctgctatagacgagctagaccaggacagaccacttggacttcactcacctggttgagtataccagtcgtaattgtaggcactggcaatatagtacagaagatgacacttcagatggctacagatgctgtgaagaaactccaaggaactcttaggcgaaggccaaaagcacaaggaggagttagggcatggcaggcagtccccgtgttgccagaggaagtgacgatgggattacagctgtgggaaacatttgcatttgattctgaacacagtgggaagctatggaagggtttggggtctgaggaagggtcaaggcaagaagggacggtgtctgggtttaggagacacagcagagacagaagtggaagcagtagtcatgtgtctggaggcagaagccaaaggccagtgggtcttggattttgtttggaatgtgaataaagaaaaattaaggcacccccagagttctggtttgagcattggagtcaacagttgccccctttactaaagtacagaagcccagaggaggaacagaagtttgatggtggaaaaaattgaattttttttttttgagatagggtctccgtctgtctcctcaccttgagtgtagtggcatgatctcggctcactacagcctctgccgctcaggctcagtcttcccacttctgcctcatgagtagctggacaacaggtacacaccacatctggctaatttaccccccccccgccccaagatgaggtcttgctatgtggcccaggctggcctcagagtctgccaggctcaagccatctagctgcctcaacctccgaaagtgctgagattagacacaggagtcactgcccctggtcacaatttccattttggctatgttcaaggtagatatactgactccagggctccagagggaaaggctgacatacgaatttgggaagctttaccatttggatctatggaaagataagtggggagtgcaggcagaagagacctgggaccctgtacaatttagtggcaaagtcaccttcagagagatgggaagaacctcagaagagggtggagatgctgaatggttgagggcttgcgaatagaaacaagccacctttggcttttgagactgagtttggcatgatgttggctcactgcaacctcctcctcctgggttcaagcaattctcctgcttcagcctcttaagtagctgggattacaggaacacaccacctctcccaactaatttttgcattttcagtagagacagcatttcactatgttggctaggctgatcttgaactcctgacctcaaatgacccattctccttggcatcccagaatgctgggattgcaggtgtgagccactacacccagcccaaaaaatctttttgatgagtggcagtgcagtaggctcgtttgataccagcatcacctcagatgcaggagtagtgcactgcattgtgatgtcactaagcaacagatatttttcagctccatcacgatcttacaggatcactatcatatctgcagtctgttgttcaccaaaacatcatcaatgtgacatgaccatagccattccagcgagtggaggagggcctctgcaggcaactggaggattctcaagtcgtcagggcaggcaggctgctattttcattcaccgcttgccctgtcttcctgtgggtcttctgcttaagattttagccacggttggttgggctgggtgctgcagtggggagagcactgtgaggtaattggccgggattacaacagagacatgattgtgctctgaacatcccatgcaaagtggggacggggcaactgagaattagaagaccagcagcattcagggataatcctttccatccttagcaagttaggcgtaatgcatctcagtttttaataattacggtttactccagcagaaccatcacagagcctctcttcagcccccccagtagatggtatctgaggtcttctgaaatgtcaggctgagccagctctgaaacgcgagatggcccctggtcacctcaagtggctatcaacaaagagacaaagaggccccctcagcatcacagccattggtaaccatcggaattttacatagagtgatatgttagccttgaagtggtgaaagctgacatctagaaagcattggtagacttctgtatgaacttaatgccatcctttaaagttaagcacagtgcatctttagtttttaatgagcactgtttaccccagggatgcacacaccccacagtgccatgcctctcagtaccccgtccatggtggatccatacacctgtcactctctgccacagctgctcacacagtgcaggccccgagcttaaaagaaacctattctccatcccacccaatcctgctggtccttgtggctgggatttgaatccacccccatcccgtttctacggggggctgcacaagcctcaccactaggctgtcccaggcccattgggtgatcatcccgcattgtacaacctgaagcagtttatctgcctgataagggctccctaggggcagggccacagtcaccaagagccacaagagggccacaggcagcccatttgcagaaaatgtgcctgagtttgcttcagggcctgaaagcattgtcttgtttaatctcataggtgggttgatatcggccccatgtttcaggtaacagagggattcagagactttaaagaaatttacacagttatgggggagagagacaaaagactccttttaagtaaattcacacatcgtaactgcaatgtagaggtctaccgctgtgtccccgtgctccttagtctaggatgagtagtagtcaaatcaggcttggatccctcttctggtccccaacccctggcccagtaccagtccatagcctgttaggtactgggctacacagtgggtgagcagcgcttcgtctgtatttacagccactccccatcactcgcatcaccgcctgagctctgcctgtcagatcagcagcagcactgcattctgaaaggcatgcaaaccctattgtgaactgcccatgtgagggatctaggctgcatgctacttacgagaatctcatgcctgatgatctctcaccctctcccatcgccccctgaagggaccatctagttgcaggaaaacaagctcagggctcccaatgattctacattatggtgagttgtgtaattttttccatgtagtaataatagaatgtacaaatgtaacacactttgtatctcaaaagcatccccaccccctacatctgtggaaaatttttcttatacataactcatccctggtgccaaaaaggttggggactgctgccacgtgaccttgcacatggccctgtatccaaatgtaagccacattctgcttctctaccatgggcctggggcagtaacttctcgagcttcccatctcccatggtgagaacaccaagaaatagatgaaatagtgatgcccagcctgacagcagtcactctgaaagcattacacagcaccttcgtccttactatcttccaggccatttccatcatcatctctggcattctaatgccagactgctttgatttaaaataccagatttcagaggctgaggcaggagaatggcatgaatgcaggaggtggagcttgcagtgagtcgagattacatcactgcactccagcctgggcaacagagcaagactccaccacgaaaaaaagattttgcaagcaacttcacttacattttggaagacttagtatgacaaatacacaaagaaaaatgactagaaaactatgtaactactgtcctaacagtggttatccacaaaggatgagttgacaagctattctagttctgtgttcccctcccccccccaacaaacagtaaagcctttctcacttttttttaattcaccatttaacttgtgcttgtagaagagcaactacacagccagagcttgcagaagaaaagcctgaagcttaaaaatatcaggaacacagcagcaatgtcacagtgttattgaaagcacactcaaaatgtcatgaaaaaataatgctgggtttaccgaagggggatttacattcatctggtgacaggttgtgcgctcagtattttgagttctttaatccccaaaagccacagtgtctgtcctgtaggcatccatgtccccagccccgagtcttttgggttcttgcctgggagtcacacttacctcctgcttttctgggcacgcctgtcctgccctccaccttccaagaccatttctatttctggttgaaacgttgctcagtgtgattccttggggtctgtccatctgtacctctcataaagcagcaagcaacagctgccttgtcacatccccaccttgtgccaccacctaactagcatcttgggggctgggcttggatgcatttatatctagtcatcgactctgggctcagagtgcacacattcaacatcaaaaccaacctctgctcctgattagccataggatttaccctctgtgctttattttccatgcccttaagattaggatggtaattacagcacccatttcacatggccggcttaaggatgttatgagaattggtgttagtcctttagttcaagatttgacaagcagtggcttttttaatccttttaaaataaagtacctcgtggtgttgggatccggagaaccagacccagacctgccttcaaggaacccttgggtactgccagagccatttctggatcagttgtggatggtggaagtcttggagacccatttcaaaccaagaggtaggaggtaaaggccttgatggatgtcagcatagttcacagtggaattagatttcacggggcacccatcacgcagtcctgaggcccaggtgttgcctaggaatgaattcaaaggctattcagcctggcatgctctgatactgcccatcaggacccccgcagccatgcagtacagaaggcagagcaaggccactccctcccactccacagatccaaggggctaagacacagggagaacattctccatgatcttcacatcctggaggcagaactgggttttcaaagtggtgagactcacagacttatgagggagctaggtcgtggaagatgctggccacatccccgccacacacacagatcagtcctagctgggttgcagggatccagccctctaagcttcaaaggcagctcctagtaagtggagtattgaccggctcgccagacccagatcacaggtgaaacaaagtgaaaagttagtctctcctcgcagccattttcactgatgagcagttgaggctgtccgattaatgtcagccgcatgctggtgacaggacacaacgcagtgtaccccaagaggcttattaaaaagaacagccactcctggggccctctgagggtgccctcacacacagacccccttttccccaactccccagtgctgtgttaagttgctagcagcagggaggatggagatggagtttctgaaatgaacaccaaagcacatgtcaggaccacgcgtggcctggcagggggctcattaccgcagcttacatccttctccctgcaggggaggggaggcagtgccctggggacttatgggctgtctcctaggtgaccgtggcatcccaggagttccttctccagttgccttccaggtgagcttagagccaggtgcatccctgggggcatgatgtccccagagtgtctaccagcttggtgacaatggaccctgcaacccaggaggcctggcccctcatggatttagggatggaatcatctgtgccgttttccttcccgtgttttctgcccagtagtttgaaccgcatttctaaggccgttcactctcctgtgtgaccccaaaatggctctggcaataccaggtctgtggagtaagattgaggtctgacctgagcatagggttcacagaggagtgaaccctgctggaggtggccaagttcagaagtgaagggcgagggcattcactaagcagcatccccatgggccacgctctatcccagcatcaaacgttatcgttggctttgtcccaagaacctgcagggcagattctgtgatttccccctttatttttgcttgcaccattttttaaaacagctcaagagacagatcacataccatacaatttacccacttaaagtgcacacagcttgctagtttgactttgatcccccttcataggctaggaactcgagtcctagaaaggagcatcgtgagcagcccaagtacacctgctggtgaatgacacagccaggagtcatctaagacactgtccccgtggtccctagtttttacccagagacggggacaaaggtcgctggctcttgagagctacaggctatcagggtcttccctgaggggctgttttatgtcgggaaagtctagatttacaggcactgccttctttggagtcgagattgaagcctaccgtggtactgtttctcgcttttatggcatagttccttgagttttcacaaaggcttggagtcctttagccatcaccatcaagatgtggaacaactcctttccccccaaatttcctagcattcccctataggcaacccgacagctcccggtctgtgctttgtcatttctagttttgggaatttgacgatgtgcttgagattcgtccatgttgccaaaaacctgcatagtaagaagcaaacattcacccaacacaaggggtgagggctgatgcgtaagaaaaactgcttcaatgcgcctttcaaaccgtgtttacatcattgcaagggccaaggtcacctcgaaatgtaggtactggaagagaaatccagaatgttacatagaagacgcacgctaacaacagagcctaggaaaggtcgccacacgtcctcatcccagctccagggggggcaactctgggctcagggatgtcacttcccacagtcaacatgctgggattgaggctcataccctgaaagtggcctccccatcatcactgaccccgcccaggtagcagaggaacgtcgggttctggatccacagctcggaaagtctgctttgtgactggagagagtcaccgtcgaggagtggccattatcctgagcctgtcttttatcgccacgttgatattttacccgtaaccatgaaaatagatggcgactggattttgttccttgcggtatgtcctttgcaggtaaatttaggaaacctaatagggtaaaaggctcaaggaatagggctattaaaacggggagactcctccccgcatgtgaaaaattgagttgtctcccaccactacctgaggggtctaccccacccctttgggtggtggcttaggcctccatgtctgtatcaccacatctcacagacgagactgtcctggccccagaaggtaggaactgagtcttttcaattccccgagagcccatgatggggtctggcctcatgtaagaggaacatgaggaaagccagagatggcactgtcattctttacccaacagccacaacttctccacccttgtctgccgacctgtctgaagactgcaacacccacccatttgctgctttttatttattcaggctgcctgtaaatatccctgctgaatagccatctctccccatctctagccccttgggcctctgccgtctctggagcaggcagccgaagacctacaatacctagacgctgatcttgttcaagaaagacgaggaagggcttttcagataaggttccctctgcccctgcagcaccctcttcccccagggtagggagttgaggagttgcaccggtaaaaggttgtggtttggcaacgatgctgtattttgggagtttgtaatatctttgtaaaatcctccttgattgggtgtggtggatcgtgcctataatcccagcacttgggaggcctgaggtagaggattgcttgagttcaggagtttgagaccgtcctgggcaccatagggagacccccacatctctaagagaaaaaaatctctactcagttcctttggtatattagatgcctctaccagtaaaagttcctatgaagttgctggctagacttcactagtgtctcttaccttatttcagtcatttcaggatgtcaaaggagccaaatctatttctaatcaccaccaactgcataaatatgcatcaatgatgtatgattggcactattatcctcatttcacagatcagaaagctgtgttttggggaggttatggatctttctccaaggtctagagtgtcttaacagaaggaactcaagttttctgactctgaatatggagttaaggcctttggcaacccattcttatggattgccatccagacgcccctttttcttgtttgtgaaactgtaacagacctagtcccagcattaacagagtccctgctggggagcaggaatggaacatatcttgtccacacattcctctgttgcttaggccccagagctgcaagcccactttgttataaaaatgcagttgtgcctaacaactgtctgcttcttggtgattggctttatgattgcagccagctaagaaatggtgttgtcattccagaagtctcggtggtacacaacgctgaagtcggcagctaacaagggctatgagagatgagaatttcactctgaggatcctgtggggaggaggcatctgcagcagggactggagggaaccttggtgttaaaaaaaaaaaaaaaaaggctgtcattgtaaatgtgaggcgtttcagcttccgactacagcccatgtctctactgttggacgccagtcctgggatgagcctggcactggcttcattcccctgtagcaaaggggcccagtggggacacatggggtcgtcttctcttctgagtactggccctagtctcttatccacattagcccccacttcctttgccagtttacatactcccagtcctacccaaccccccaccttcagattctgctattcagccagacagcattaccagtattaggctgttctcaatctataaagatggcagttgcaagaggttcagcctcacatacgccagcagccaccagcactctccattcaagtccactgtgctcagcagtctgggttttccatctgtcacgcactcactgaagcccctggtctagccagatttccgcaggtgtcatccactcaacttgtcccaaatgaagcccatcctcccgtggcctcacctgccccctcctcatcctgggttctctcaaaccatcacagcacccctgcctccaagcctgtgtcccgagacatggctctgctccacatggcctcgaggattgaaccatccctgtgtcacagaagcctactgtcacaccctcaaccacagcagcctacactcactgggacttcccaggtgccaggcacagacatgtgacacatatagcctcgtgacagctcagtgcacgtcccgagctaaccctgccttccaggaaggggaagcagctgggccgggtctgcccggctacaagtccaccccctccccatgggcctgccaccttcaccttttttcattttcacatctagagggccctttacacagcaaccctcagctcacttctggtcaccctccacacctctgcctcctccgggaagccctctgtgccctgctcagaacaacctgagttccctctcattggggcatccaccgtgatccaccacagccatctgtccagtgtctgccctccccatcctcaatgacactgtggctttccaaacctgagaccacttctgcaccccttcatgcccagcccagcatggtggtgacacaggtcatgtgtttgaatgttcactgttgcccattgtctctctaggcacttgatccccatgatgcttaaaaccaccccacctttattctgtccaaggctcagagggcaggcatttgcctacagaaacacagctagttggtggctttaggtagcccttgaatccttaccaccacagtactaggatatgcttatggttgtcatccccaaatgacagacaaggaaaccaagggtcagacagcactgcccacagcaggactggacagagacacgtgcctccaagctatgtcctctccctaccccttcataacagtcaccccaccgactgctacctctcctctcccaaccaacaaggcactggcctctcccaggcactctcagagcctgttacctccagggcctctccccccaagctctggtcattgcagggcagggctcatcctggctgtgctgaatgatgatggtggttgcaggctaagtggctgctcagaccccgcatctgaagagcatgacaggagggggttgtgagggcatggctttaaactgacttttacatccaagccttcctgtatctaagaatcagttcccctacactgcaagcaaagacctccttccagcatctttgaaccatcctctaaggagcattcagggataaagaggctcttcgtaagtggggtcccccatcctttgaagagaggatcatgtttgctttgggcctgcagccagacacccacctaaaggaggaaagcacagcacacgccaggctggttgggctcagagatgattcagagcagctccggctttgttcaaggtcaaatgtttctttttcatccatgcacagaaggcaaagcaacaacttgacttacaggaaaagacaatcattaaaaggggtcttcattttgttagcttatcagggtgtcaaacttgaaacgagggatctcactcgcacagtggccatgtccctggaaaggtgcaacgcaaagtagatcattgtgaagagattcactcctgagatacatgaagatgctaggctgtttcagggaaccctgcagggatcctcgaggggaatgatttctttatgaatgcaagtctcttaactcacatgatttgtgaaactgggcttggatacagctgggggtggatgttcctgatctgacattctcacttggcatctttggtcctttctaaaccacagataaggcagagctagctgtggacacagtcctgtcttcccttgtagggtccagtggatccaggacttacatccagcaagccacagcagcacagaggtgctgcggacgcaggagtggacatggatcctgttaggtttttgccttgttttaaaacattttatcccagtgaggtatttacttcctattcaaatagcgtatagtaggcagagtaagaacattcctagccccagaatttatgtgtccccttatctagcaaaagggactttacagatgtgattaaggattggccaggcacagtggctcacacctgtaatcccagcactttaggaggctgagcaagaggatcacttgagaccagcctggacaagagcaagaccccatctctacaaaaaattacactcaggtatggtggctagtacctatagtcccagctgctcaggaggctgaggtgagaggatcacttgagcccaggagatcgaggctgcagcaagttatcattacacgattgcactgtaaaacctgggcaagagtcgagactgtctccagaaaatacaattttgaaaaaatgcaaccacatcacaggacttcctgctgagcaccctctgctctcacggtgaagcctcccagcctctaccctatcccctaaaaaatgtgccgagggcctcccacacaacccagacccatgccctgggacccacacacgctgtgtgttcgcgttgcttcagaaccaggatcagtgtccccctcttggtgttatcttccactgttcctggctcttaaacacaataccatgccaaacaaccttttaactagcccctagcctagggcctgattattttcttaggattaattccacaggaagtccgtctcctgtgttttgctacgcatcttgtgtggctttatgtagtgttctccaaagttgccttggacttagaagcgtacctttgctggaaaatcaaggaaaatgtggggaagaaagctgtgcctagaacattctttcatagccttaaaatgtagaccggaacggtggtaccatgagctagctcagactcacagccaagcttggttggagcctcggagtgctgttaaaaaaaaaaaaatggaaaggtttacgtgacaataggggtttctcatttcttcaggtggcaccagttagaggcagatccaatgagccagtcacagttgccaatcagatccctcctgccctcacacctggctccccttcctggcctgtggtcatttgcttttcatccccagacttaacccgattctctccctgctctttcagcgacatcaccccgcccggagagcctgtgaacagccggcccaaagcagcttcccgcttccccaaactgtcccggggtcagccccgggagacccgcaacgtggagccccagagcggtgacctctgacctcgacaaaaccgcagccacgggccctgtgcgtggcaccagctgcgtccaccccagccactgccgctggcccctcacctcagcgtgacaaccacgtccacctggtgatcctgagagcacacgattcccaacagttacacaacaccccgattaaactaatcagtcttcgagccgcatgataccgtgacccgagagaccaaggcagcacctcgctggagagactgggacacacagtccttctgcttctggggtctaccctgggctgcaagggctgttcctccacctttctgtagttcagggctggcaggagggtgggcaccaggtcaggctgggtgcgccatggttgagaggcaaaggtgatcccctatataggaaggttcatgcagagccagcctctccactctttcccacgtggggactagaatgactattagcctctccttttgctttttaaggttattacctggcctaacctagggatggctggctttgcgggggggggggggggggggggcatggttcctttcactgcattttccaccaacagtcattagacacctggcactgtcacagctcacttttccagagggatattcctgtggctttggcaaggagccattagtgatgtgcaacttgagttcagagaacttcccctacctcccccatggctggcttcaggaaggaccagtgccctccatagcctgaggccacctaggccctcgccaggcttggagtggggggactcagacatctggcccagccatcagcagcaacctagtaacccggcgtcatccagcgtgtccaaagtagcattggccctacagtcatgagagacttgggtcagggaaccactgcagaaggttccagggttttcaaaccaggctccatgactatgaagttggacccagtgtggacacttaacagatcatgtgtctctccactaaaaacattttccatcccgtctgcccccgacattgtccttgataacagaactctgcatcccctaagacagagtcctctgttcctcccatgtcaggtggctctcagagtacagggaccttggcaggtggagaggaggatggggaccagcagctgggcagcccccagggctcctcctccagtgagctcacatcagagcacctcacagagcaatagccgtcctcagatgctcagcaaagttgtggcagtttgcatttctagggtaaactaactaggaaggatgtcgtgaaatggactatgcaagagtaagtttgtgtgtttcgccttaatctgaggcagagacacagcagaacctgaggagaaaagcaggtggaaggtgacggttagatggtaagccatgggcttgtcctggaactgcttcaactcagtggcttaaaatgagaactgcccaggtgagcatggagcatctcctaggctcgaggacatctctggagaatcatctggaaggtttatactgtgccttcccctcgtagcaaaaaggaagattgttcatggcctttaaggaaggctgagatcactcacacacagcgcccccccaccccagagaaaccgagtcagcctacatgacttccaaggggacctggggccagataagccctgccccggtgagaccaaatgagctggagcatgtatggaggtgcggaccctgcagtcagtttgcgagtgtggaggacccgagacatcctgtaaaggcaacttggtctccctcccactcacctgccaacattgctgcaatacacatggtttatctgaaattccaaggccagagtgcacatcagctcacatgactggcaactctaaatagagagccctaatggactgaggcaggaaacgtctaaaagctcaatctgctgtatgtcatgaccccttaggttgggtttatgccacatcggtcattttgaagtaggtgtttgatgccagctcagagactgtctcaggagtgcctccctggcctgggtagctaccctggaggtcatctccctgttctctgttggataaaggaacctcccccatctgtgacattcccttgggcccaggcttatgacctgcaccttttctgacacctgcccccaaagcacaggatgtgaattggtctctctccagataccccacgaggaagcaccttggacattctgcacatgataataatgcaacagtcccccattgctgagagatactaacccgtgagaaacaagtatgctctcagctggtattgaactggtgggagaaactgcctcctacttttataatactgaattattcacaaaaaacctggtctgctctccaaaatgagagcatgttcctgggagccacatggggaccatccccagctgcctgctcctggtacctcccccatgatcatgcacagaccgtagagtcgagtcatctcgcagatccagaccatctcctctcattctcactctaaaaatgctggtggcccgcacatgacagcaactccccgaagccttccctttggaatcccatagaatgttctgcaatgattgggtccatcttgctgctcagaagaatcccgtcctgctctctagtgtggtgggatgaacttcaggcaacaaacaactggcagggttcccagttcctggagttatggagcagaaacacccaggcctagcagaattgtggctgaaacctggtgcccaaattccacaccctggaaatgtgtcaactgcctgtcagcctggattcaattctgagggctaagccacgaccttatccatgagtggcgaagacacccctgaggaaaggattgcttgcacctcacatctgtcttcttctaagattactcggagattttcaaacaacatctgagaacagaagccccctcccctactcagagaggaacgagggtggcccacctctcaagggccttggattcctgggaccaccctttgctgggaggaagaatccacaccgaatccttctgtcttcatggcctgctgtgctgaaacagaacagcaggttccatctttcacatctttttttctcccccagatgaaagacgactcaggaacggtagggctgggcagaggtgtctctccttgagagacaacaaaagcttctaagggagggagcttaaaggctgctagaaacctagcccaaccatccactcctgatctgagacagaaccttctccgccactcttcctgcaatcagtgtgaaattccagcttctttgattcccacttagcagtatgctccaatcacgttgctggcaaggcattttagagtttggagctgaggttcaaagccccctgcatttctctactggcaggccctggtgaaggaagacactttcagggaagaggctcttacagtctatggtggtagccatcttcacatccagtcaccagttgcatctagggagctgctggctataaaagggatcatccagtggagttgtaaacaagggaaccatcttgcaagatctaggaagaggaaggggagggatgtggactgggtctgatcacagcccttggccctgcttcatactttggagcttattaagatcaattttgataaccatgtaatttcttagaaccatggcaggtagtattgtgctttaaaaaccagaggctcctgaaagtcgtttacaccaggtggattgataccatggctgtagctgatgcaactaacaagtactggggccagtgatcacaatccaggttggaaacaggagtgaagcccaccagcctgcctggttgatggacagcaggctctgccttctggaggcggcttatatcccaacagcctgaggcagggctctgtggcccaggccggcagtggctgcctctcttggttctgcatggtacattttgccaaccctgaggaccagttcttggggttccaggcctcggccttcctgctccacgtgctcaagcccccacagggggctgcgacaccatctggctcctcacagggaggtccagccatgttctctgggctcccagtgagccccctcccctccggctacccccagaatccatccttcattcctccaccaagctcctgtgtgagctgcagcacccacacgggggaagccctgcactccagcagcatcttccagccttggcacagaactgatggcaaaggaagggctgggttttcagcttctgggacccgaggaagaccccacctcactcctccttccccagtacatcagactggttaggaggcatcccagaaggggcagcctcatgcccaggtttcagccctaaaggtaatgattgtcttgactctgccttggcatttcgctcggaatcacggcagacttggagtgtttcttcaaggcaggcatctgcttatgagcaaggtcaaagatttttcaaaatattgtgcattaattcattaaagctactgttaaatatttgctgtttttagattggcgtccgtgctaattctgcagttgtagcactgtatattttatctcatttctgtgccaagaaagttcatctttatgtttttctaatacacaatcttgatcttgtttccaaaataaagcttcagctccttggtcaatagaagtaagggtgtagccatccagggtctcccggctctaggcagaccggatcccgcagttcatcccatggttgttgaaatgtacctcgatcagtcatctctggtattcctcactctagccatgagccattgccatcttatgggcccgatttgggtactctgaattatgtcatggagtagacagttacttctaaatcccagcaaccaagttgcgtatccttccttatagctagtttctatagagaagtgaaaaagaaatctggcttccttaataagatagttgagcctatgacattaaggagcagcgctgctggcggaagattctagattcactggtggtttaagaggcccagggatttagttcttactggtgcgtaagtgttttcccatcctaaccggaaaaccactcacccaggcttcccccacttcccctcaaattttctcagctctgccgctggtctccatgaacggcaaggggaaccaccactcattcactgtcagtgtaggtaagacagaggatgcccttgcaaaaattgggactgaggacagtagcacacggaatggtggatcgtacatttgcacccagagctactaaacgctcagtgaccccagagaccattaatttcccggagtgaaggggatgggggtagagctaattggaatttttattatccaggactcatcctaagaagaatgttggcctctcttcatccctggcttagccgtcaggtagaacgcttactcacctgacaccgacttcttagagaagcgagtcttttttgaatggaggagcgatggtaaccccactagggggcgcccatgatcggctcccagtgcacccccttaagggtaagcaggccacatatctagagtctgatagtctgtgtgtacataaggtctagaagtctgtggaaacgccctgaaacctgtagtattatcttaactaccctcttatgttaaggtttacataataggatttttaaacaaatgtgtttaattttttaagatctcttgtattaaaattttcttttggaataagctgtggaaattttgttacaacctggttgagatcaacctctttacaatgacacaaattgtgacattttataaattagatacttcagtggatggtctctgtctcagttctttttcaacaactggagattgaggtgaacttaatacacgtggatcaactgaattgaaatggagcagaatctcattttgagttaattaggcagatttggataaactggcaatgcagcattaaaatttcatacagaaaacactcctcattacaggtacctatgtattcacttctagaagaaacaattattaggcggctactgtataccaggtgcttggcatacagcagtaagacaggtaaggtgtactgttggagtcgcactggacatgaagcagacagatttttaagaagtcaaccatccggataatttcagaccacagtaaatattgcaagagtgacaggaattagaaattcttggtcccaaccaagaatctacgttcaacagcctaggcactgctgtcattggggactggatgattctgttgtggggggccgtcccgtacattgtaggatgcctccacctgttagaggccaggggcacccctttagttgtaacagacagatgtccagacatggccagaggtcccctggggggaggggggccagtggagagccatggggctaaggccaaggggtcctcttggctaaagtggcttttttttttggagacagttttttactcttgttgcccaggctggagtgcaaaggtgccatctccgctcaccacaacctccgcctcccgggttcaagcaattctcctgcctcaagcctcctgcgtagctgggattacatgcatgggccagcactcctggctaaagttttatgttttagtagagacagggtttttccatgttggtcaggcttgtctcgaactcagacctcaagtgatccacccacctcagcttccaaaagtgctgggattacatgtgtgagccaccacacctggctggctaaagtgacttttaagctgagacctaaaggatgaaaagaaactctgcactgcccccacacctcccaaataatttacactggcttaagtactcagaccctgcaacaaaataggcaacatttttaacccagttatggtaacagagaaaagaaaggctcctgggatgagaatccaggcataaagtcagttcccaccagggccgcatgaagggcattgttgcaggtggctcttaaagcccggctgcgcaaaggctgctgtgggctgtcacagatggaggcgatgcgtaaccatttctgtctgggggtgggggtgatgtgggcactatgccaggcaccccacagctgcgttgccatgggcattaagtcaggaggccgcacttaggggaatgcagagggacgtcaaggcagtcttcaggctgctgctcctgtcctgcaccatcctaagtgaccctcccaatgccacctccatcagcgctgtccagcagaaataccatgtgagccatgtatgccatttaaaattttcagccaggtgcaatggctcaggcctgtaatcccagcactttgggaggccgaaacaggaggacagcttgaggcca

SEQ ID NO: 571 - DNA, 89242 bp, Homo sapiens
  source 1..89242: mol_type = genomic DNA
aaggcactgtgtgatctgacccagcctcttctttcagttccccagttctgctctgctctctttctacgaggctttcacacatggtattccctctccctggaaccacttcccctcagtcccgtgcctacaacacaccaccatggccttcatctggtcaacatctcaatcttaggtgtcattcagatgtcctttcctctgtgaagcctttcttgtttcctctgggctggctgagcaccctgggctccccctgccattaacatttgatttcatatcttccaggcccatccattgtatcctcaatacctagcacatgcctggctgttattagcccctcatagaagagatctatgaagtatcatgtagccagcttctaagatggcccccaatgacccctggttcctggtgttcatgccctcgtgttgtcccctcccatgctgaagaatgctagtctatataaccaattagatattgcagacattatagacattatagtctgtggcttttttttttttttttgagacggagttttgctcttgttgcccaggctggagtgcaatggcgcgatcttggttcacagcaacctctgcctcctgagttcaagcgattctcctgcctcagcctcccgagtagctgggattacatgcatgcaccaccacacccagctaactgtgtatttttagtagagatggggtttctctatgttggtcaggctgatctccaactcccgacctcaggtgatctgcccgcctcggcctcccaaagtgctgggattacaggcatgagccaccgcgcctggcctagtctgtgagtttcaaggcttagctataaaagacattgtgacttcctccctgctctctcatagatcacatgctgtggaggaagccagacgccatgttgtgaaggcacgcaaacagcctacagaggtccacatggtgaggaactgaggcctcctgcaaacagctagcaatgacttgccaggcataagtagctactttgcaaatgggtcttccagctcatcaggcattcaaatgactgtagcctgactgacaactgactgcaacctcctgagaccttgaatcagaactgcccagctcccaaattcctgacccatagcatctgtggggtataataaatgtttcggaataattaattacgcttcaatagacaattgacacacacctaaaagtgtctttttttttttcataaaattgttaaagtcttttgtagaaaagttcaattctatttttcttctttttgaagactgcatttgtttctcagtggtcatatcacactgtgtgggagacgctgaagtatcagcaggcagcagccagaacacctggtggcccctcccaagtgactccaaaccagccagctggctgtggcctccctgggctccccacttcccaggcagctgggagtggggaaaagttaggtttcagatccgctggggcccccacccacctcattagaaaaatcagagaggaggccaagtccacagcagctgttcatatgacatactttatttccaatctacaaccattaaaaacgctttataagtttacactgtacagttattctcatgtctgaaataagacacaggggcagggagagctggtggattggactgcagttgtcctagcacccgatccatcctaggaaggagccttttgaagacagaagtggaaaggagagaatagtggacaagagaggtggacagttggcccaaggatgcccttggtcccttccctcccatgggccttgccctgggggtcccccagggcccatgactgcaggaccctcaccaggaaaccaggctgagtgggaagggggttcacagtattggcgggggctggggaggggccaggatgaggaggaagggcagcttctggctctcttcccagctgctgggggttggagctgttttttggcactgtctacaaggtatccctggggttgggaggaggaggaactggggatttaggatgctttctttgtggagttaagatttctttcagtttgaagaggcgctatctggcctatggtgaggttcccaagggagaaacagtcagggtcttctgcctcctgcctccccaggactcccaccccctccctggctggcaccatccacacagccttttgtaaaaccaagacaagtgagagaggtgagcaggagcagggaaacaaacaatgtgtgctttctccaggcccttcaacttctcttcctcttccaagaggagcgactatagggttggtttttgttggtggtggttcccaatctcaggagtccagataaggctggtgttttccacctgttcttggcctagccagtcccagtccctccccaggctctactaatggctagcccagatcagcagttggcatattcttatgcgtcagaatcatttggagggctccttaaaaccccagcttgtagggccccactccacaagctctaattcagtgggtcttgggtggggctgctaatctgcacttctatcaagttcccaggtgatattcctgctgctggaatgcaatacaagaaccactggctgagaatggtgcccgcagtcacctcattctgagcagcctggtgtctcctgggcagcactaaggagctgggccacagctggcaaagcccagccttggggcaccacatcacctgggaagctgctggaaatggtcttggggtgagtcccccgtgcagagaagtaaactaaggcacagagatcagtggcagagctgagagaggagccaggataccagggcccagtagagaaaggatggggctgcaggaccctacagcatgaggggtgctctagggaccacagggccatcctggtgctcatcacaggatcacaagactgggaaggtaggagaagtgaagacatctgcccagacctgggccaggtttccagattgccagctgaggtccctcttcttgggaatggtttgagtggcttccaaataaagagtgacaaggcagccagccctgactgcctcagcccttcaaagatgtttagagaaaaccaaaggtcccttcctcagggcatggtgtccagaaagctggtgaagggcaggaagggaggggagcagggccgttgggatagacaagcagcagaggaggctccaaggagggtgaggaaggagtggcagggctggcattggagagaagccctgagcaggagacttgggcccagcatcatgtcctcagtcccctcaggacttgggtctgtatattttgcaaactgcaaatgctgttgggttgggaggggtaaggcatagagttggggtgaactgtagattctgccaggacaagcagctctgagagtggtgaggtccagaggagaatggagaggatggttggatactgaatggacaaagagatggatcaatgaccagagacagggagagaagaacctgtcaggcagcacctgctttacagtcaaggccatctgggcctgggcagggcaggggaggaaaaaggagggatccaagccccccccacccaccaccacacacacgcccattgcaaagtgctggggctgctgctggcaggctgcttacagagaagacagtgtggcttaagggtggcaccggggggttgctggggcagggtgagcccagtgagaagggctggcagggctggtgcctcctgatgcattggaggaagaggcttttttttgtgtgtgtgagaaaacacaaaataaataaacacagaaccaggacaccaccacatttgagagcaaatatcagagttgggaaaccacagacgcggacaggaaggcttccctggtaggaagcagggggacaagaagccagttactgaggttacgggaaaatccgcacgaggcagcagtgctgggaagaacatcctgggaggactgagggctgaatactatagtgagctccggacccagaagaggaaaacctggcatggaccagggccactccatttgctggcaggaaccagccaaggagaagaggaggcaggaggacaagaggctttggagggagatgataaagaaagaatgggtgagtggtgggaagcagactgagcccagagaaaggaaggggctaaaccaagattacagaaagtcaaagcagtgtctcattcactactggggatgcaagacctgttaggagtcaggaaacctgggttctggtcttggctctgcctctggtttgcgatgtgaccttgggtgagccactgccttctctgggcctgattcctcatctcaaaaaatgagggggctggacacaaaaggacaaatactatatgattctacttaaaagagatacctagaataggccaatccacagagaaaaaaaaaaagtagaatagaggttaccagggactggggacagggggagtggggagttactgtttagtgggtacagagtttcagtttaggatgatgaaaaagttctggaggtggcagttacacattgcaaatgtacttcgagacacttagaaatctttaaaatggtaaatttaatgttatgcacattttgccatcattcttttaaaaaggaaggggtttagaccaaattatgttatggcctccttgctattcatgaagactagtgaagggggtgaggagagtattgtcccccaccccagggccagggcactgaaaggctgggctggggacactgagtgtgatcagatcactttccatttgtgtagaaccttacacttttccaaggagactcgcaggcacagtgttgcagttggtcctcaccacagttacatggggtgggacattatcctcactttacagatggggaaactgaggtatagactagaaacatgatctcgccaaggtcaatcacgttggtggattatttatttttttaaatagtcacctggaaaacatccttgcatcttaggttcacccgttgactcaccaactggctcagtggcccttgatgaaaggatacatgctataaattagtagaagagttcgtctcctggggccaacatgcttgcttcccataattggatgataaaaattataaatcctgatgtgtttctctttttaccaatggctgtcaggaaactcaagagtaaaacttaattgcatgattatgggaattacaccagttagatttacagaataatttctcttgcttttttacttcttatttttattttactgaacccctatgattaagattgtaaatagcctctgatgctttttgaaaatcctgagtaattaaatcagtttggttgaggactcgatcccttaagtccctgctcagtgctctttttaagatacagcatcatgtttattggttaaaagaaagatgaggctggatgccgtggctcacgcctataatcccagtactttgggaggccgaggtgggtggatcacctgaggtcaggagttcaagaccagcctggccaacatggtgaaaccccgtctctactaaaaataaaaaaattagtcgggtgtggtggcacacacctgtaatcccagttactcgggaggttgaggcaggagaactgcttgaacctgggaggtggaggctgcggtgagctgaaatggcgccactgtactccagcctgaatgacagagcaagactctgtctccaaaaaaaaaagaaaaaggaagatgacctggcacggtggctgatgcctgcctgtaaccccagcactttgggaggctgaggagggcagatcacttgagcccaggagtttgaaaccagcctgggcaacatagggagaccccctgtctctaaaaataataataataaataataaataaataaataaataaaataaaaaataaatctaaaaaaacttaaaaaaagaaagatagcctaataatcagggccacgaacaccaatggtgtggccaatagtgcctaagatcccccggggagggctggttttattttttattttttttgagacaagtctcattccgttgcccaggctagagcgcaatggcacaatctcggctcactgcaaccgctgctccccaccaggttcaagtgattctcctgcctcagcctcccaagtagctgggattacaggcatgtgccaccacacctggctaatttttgcatttttagtagagacagggtttcaccatattggccaggctcgaactcctgagctcaagtgatccacccgcctcagcctcccaaagtgctgggattacaggtgtgaccactgcacccacccctcaaccccaggagagtttgttaaacatgcaaattcaaggtggggcccaggaatctacattctgaacatgccctcagagaattctgctgaatggggacctcagatcaccctctggaatacacaaggctcagtgatctagaatggacttgttttatgcctgggttggccagcagcatattctgggtattctggacccaccaaaagcccccagcagggcagcggatttgcacagcaaacaggacagagttggacccaagttctcatctaaactcagtgacttctcatgctctgggatgagacctgtacctcagtttcctcacagcaaaatgggcgcactaacccatgtcctgccaaggctgcctcccagagttgtccctgagaggtctgaaggagatgtggggtgggaaacgatttcttttttgagattgggtctcactctgtcatccaggctggagtgcagtggcgcaatctctgctcctgcaacctccgcctcctgggctcaagcgattctcccacctcagcctcccgagtagctgggattacaggcacgcaccaccatgctcagctaattttttgtacttttagtacagacagggattcaccacgttggccaggctggcgttgaactcctgacctcaactgatccgctcgcctcagcctcccaaagagctgggatttcaggcgtgagccaccatgcccggccaggggaaacgttttctatatagtaaagtgctttaggcgggatgtgcaggggatgatgataaccattgttattactattattatggaagaagtagtgggagcttggggggtctggtgaggctagaagcaggggacattctagataggaggggagagggagaaagagcctggacgctgggtgggccagaggagaagaggctgggtgatgaaaccataaaagtgcatgcgggtggacatgatggaaccatgtcagcaagggtgtaagagggtcaagtctttgggcccttggccttgtcacatcggaagccaaccggtagaagagtgcacctggggacacctagaggtgggacccatcttgagttcatagaaagcaagacctcttagaggtcagcctttggtgggaaataaactgggggaaagggctggcacagggtcagaggattggattctgatgtctcgtgtgtgcaggcctaagagccactgatgcaccaaaatgacttgatttgcattccaatgaagtcatcattccaaaaggggctgatttggctctggaaagaggtgagacataagaaacatgaggtttcccagtttagggccatcatgccaactggtcccccatttccgccaaccaactgatgccaaccccatggacccaagccaagtggtctatgggggattgagccccgagggttccttgggactttggttgaagagagagtggagatggggaaaacagaaagaaggataaaggaggagaagaagggaatagcagtaaaaggcagagaggcaggaggaagggggagaacgggttcgagaagggcagcattccttcttgggaccccaattctccagggaatccccactgtgggtcaggcagttttctgctttgggaatgttaccaagacttaaaaggcatttgaagaaaccaacaaacttagaaatcacattccaaaagagtagagaatttttacaaaccaatccccccaccccaaaaaagaaaacaaccagttaccaagtaaaatgctaaaaaccgaaccaaaccaatatttacatgtaacattttcaaccccatccagccccacgtccagaggcttctgcaggaacagtgatgagtggccttgcacagtggcatgcaggaagtagaaactggggctttactgaaaaccaaggtctggctgagacaacaaagatggcaaggacaatcctggacggtacgatggtaaggctgagtggtccgtaggtcttggggctcaggtcccacggggatttctccccgaggctgagtacgcagcctccctggctgtcgctctgggaggtggcagaaggcctctggtggcttgtggcctgatgtgaatcccctcacctggagataaccttggagggcccccctgacctcatgggtgagagcagcagcatccaagagcggaactggcccacagctccactggctgcctgctctgcccacaccagtcactggggcatggaggaggcggctggcgggactggcatgaccctggtgttcagcctgcagggaagggagatgcaggacttggggtaactggtccaggtgatcccgaatgggtgggtctgggaactggcaggtgggaggtgggagtgcaggggcgcctccagagtcctgggggcagatcagcaaagctactggcttttggtcttcctgatgggcaattctgcagacaagctgatccatcctggtgtttccactctgggtccccagtcagttacaggaaggctgatgtctatgtgtgtgtggggagcatgtgtgcaaccaaaaggggttcaccggcaccaaggcgaggccatgggaggcgctgccccacatgctgcaatgagccacatcgaaatccaaccaatggctcaggcagctcacaggggacgtgaggaagggcgggcagcagagctggggcagggagaagagccgtgaaaggccataaggctaaggagagaggctggtgaaaaggctggcaggctggtgagaaccgaggcaggctgggagacactcaggtttatgtgcaaagctgcgataaacaacattctcaaagttcagtcctgttttcctgtgagttctcatttgggaaacttggagggatctccacactcttaatagagctttagtaatccacgttcgactcatgaagaaaggtgtcagagggagggagggaaatgagacaggcaatggagaacgtctggggagtggtgatggccgtccagccctccaccttgtcagtgagtatttatagactgaccgctggggctggccaagtaccaggcattgagtaataagtagtgttctgaggccacatggccagccgtgttggggtgcagggctccagctctgttgaggggccctccaaagctgaccaggaggccaggtctccaaacctggctgccaagcggcctcgtccacccaggggaccccatgcctgcccgtgctgttagaggcctcatgttgtcccagtggcaagaatgcatgtttcaacctccaataaattaccttagggactttggggtaaattaaattattaaaataaagtaaaccaccttaaatatttatagtaggaaaaattcaaataaacaatctaggcaagatacgtgtttccaggccccagtctactgctgtgtcctgggctctggcctcttggtgttctcctgggcctgacctggccaaccaagaatctcttactgggaatatctttgccccccgaccagctgcaggatgtaaacacagtggagatgtagtgcctgctgcctctcagggtgccagggaaagaggcctctgagatcacttgagatcaaggcagtgtatttaggcatttatctatgcaccaggtcttgagactgactctacctatttctgtcctcaaggggtctgctgggaacgttggggccccaagtcactttggcaaggaaggcaattgcaatcactccccaaccctgagccctgcatgtttccacttcgcctcccagctcttgctgcatccaggctatgggcagggagatccagggctccaggacactaagcaatggccctggctactgccctatcatactccctagtgtcccagcaatctagagcagtggggctgggaggaggaggtggtggagagaaggaggtgatggtgatgatgcccaacagggctccaccaggaaccaaacatggagccctagagcaaagcctgttcttctcagcagtgtctcctcccaaatgaaggggtggatggtcagcaggaaacatctctccgactccttttccccaaaggcatggccagacatgtatccttcttgggctcttccaagagggtggcatgggcagaaccaggcaaggctctctcttaggacccagggatcggctcttgacagatctctcagtggatgcttgggaagcccaggtttggtctctctcccactcactgccttcccctgggaagtcgaagctcaccacccaggggccagcaggagacccggctttaccttgatgtgaaagctgcattctggcagtggcatcactgctgtccctccagggccaggcaatgctgaggacacagcccctcgcctcacctcgtctcgtctctgctggttcccttctgctatccaggggctgggctggttgaggcggggagcttggctgctctgtcactcgctgggggggagtgccctctcctccccaccccagctggactctgaagggtgcagcctgcacttggaaggagagtggcggatggcagagcgggacgatcgggcgaagcaggaggtgagagactgggtactacagtcacaaacagcgtcctaggaagagggaggcagggaggcaggaagtcaagaggagccaggagacatggaccaccatgagctgtgtggtatgccaggcaaggaactgagactcggccataaaccagttcccaggggctgaagctcctcactggaccaattttttctttctgttgttcttctcccattagagcggtaatggaagttcattgtaatatattctaggctatacagagaggacagtggacactgtccatggtcctgcacgccaaagagattcttaacatacatttaccaaaatgacagcttattttgcaactgtaaaacacgaacacttttctgtcactaggtatgtctagatctccttcctttttatccttttttttcgtttgagacagggtctcactatgttgctcaggctggtcttgaactcctgggctcaagcgatcctcctgcctcagcctcccaaactgctggaattagcacctttgggtgctcatgcctcccaaaggcatgagccaccatgcctggctgatcgccttcttttttagtgtctctgtaccatttcactagatagaaataactgatttatatacccaattcgctttttttatttttttattttttagacagaatcttgctctgttccccaggctggagtgcagtggtacgatcttgactcactacaacctccacctcacggattcaagtgattcttgtgcctcagcctcccaagtagctaagattacaagcgtgtgccaccatgcctagctaatttttgtatttttagtagagaggggattttagcatgttggtcaggctcaaactcctgacctctagtgatctgcccgcctcggccttccaaagtggtgggattgcaggtgtgagccactgtgcctggccccaattcactttttatgtacatctgggtagtttctaattttttactattaccaataaacagaaataatgatcaaaagtgctgctgccaggcacggtggctcatgcctgtaatcctagcactttgggaggctgaggcaggtggatcacgaggtcaggagatcgagaccatcctggccaacatggtgaaaccccatctctactaaaaatacaaaaattagctgggcatggtggcatgcgcctgtagtcccagctactcgggaggctagggcaggagaatcgcttaaacccagggtgcggaggttgcagtgagctgagattgtgccactgcactccagcctgggtgaaagagcaagactccatctgaaaaaaaaaaaaaaaaaaaaagtgctgctggacagctggccatggtggctcacacctgtaatgccagcactttgggaggctatggcaggtggatcacctgaggtcaggagttcaagaccaggctggccaacatggtgaaaccccatctctactcaaaatacaaaaattacccgggcatggtggcacattcctgcagtcccagctacttgggagaccgaagcagcagaacggcttgaactcaggaggcggaggttgcagtgagccgagatcacatcactgcactccagcctgggggacagagtgagactccatctcaaaaaaaaaaaaaaaaaaaagtgctgctgggctgggccatgtgggaggctgagacaggaggatcctttgagcccaggaggtcaaggcagcagtgagctatgattgtgtcactgggctctggcttgagcaatagagcaagaccccatctctttaaaaaataaataaaatggcccgggcgcggtggctcatgcctgtaatcccagcactttgggaggccaaggcgggtggatcacgaggtcaggagatcgagaccatctgaaaccccgtctctactaaaaatacaaaaaattagccgggcgcggtggcaggtgcctgtagtcccagctacttaggaggctgaggcaggagaatggcgtgaacctgggaggcggagcttgcagtgagccaagatcgtgccactgcactccagcctaggcaacagagcgagactccgtctcaaaaataaataaataaataaataaaataaaagtgctgtgatagagccaaactgcttggttaaatcccagctttgccaattactagctgtgtgaccttgggagatttacttaacctctcttgagctttgatttcctcccctctctctttttttctttttcttttcttttctttttttttttttttttgagacagagtttagctcttgttgcccaggctggagtgcaatgatgcgatctcagctcacagcaacctctgcctcccgggttcgagcgattctcctgcctcagcctcccgagtagctgggattacaggcatgtgccaccacgcccggctaattgtgtatttttagtagagatggggtttctcggcattggtcaggctggtctcaaactcccgacctcaggtgattgggtgagccactgcgcccagcctctttttatttttctttatccatctctgtgaatatttccataggctaccttcgtaaaagaagaactactgggtcaatgggtagcacgcacattttacatactgaacaatatttggatcaactttaaaatcaacattcaaaatccagccagctttgtgctgttgtttcttgatgtggtgctggttatatggaagtgatggttaattttatattcaatatgactgggccacaggtgccgagatattacgtaaaacattgttctgggtgtttctgtcagagtgctttgagatgagattaacatgtaaattctcagccaggcgcagtggctcacgtctgttatcccaccactttgggagactgaggcaggcggatcacttgagattagcagttcgagaccagcctggccaacatggtgaaaccctatttctactaaaaataaaaaagtagccgggcgtggtggcatgtgcctgtaatcccagctacttggttgggaagctgaggtacaagaatcgcttgagcctgggaggcagaggttgcagtgagccgagatcacaccactgcattccaacctgggtgacagagtgaggctccgtctcaaaaaaaaaaaaaagcgaattctccctaacatggaccccatccagtcagttaaaggcttgaacagaacaagagggcttactctccctcaagtaagagaattcttcctgcctgacagccttcagactgagacacttgcttttttcctgccttgagactttattatttatttatttttgagacagagtctcactctgttgctcaggctggagtgcagtggtgcgatattggctcactgcctcctgggttccagcaattctcatgcctcaatcacccaagtggctggaactgtaagcatgtgccaccatgcccagctaatttttgtatttttttttttttttttttttgagatggagtctcgctctgtcacccaggctggagtgcagtggcgcgatctcggctcactgcaagctccgcctcccgggttcatgccattctcctgcctcagcttcccgagtagctgggactacaggcgcctgccaccacgcctggctaactttttgtatttttagtagagacggggtttcactgtgttagccaggatggtctcgatctcctgacctcatgatccacccacctcagcctcccaaagtgctgggattacaggcgtgagccactgcgcccggccaatttttgtattttttaagtagagacagggttttgctacgttggccaggctggtctcaaactcctggcttcaagcaatccacctctctcggcctcccaaagtgctgggattacaggtgtgagccaccacgcctggcccttttttttttttttttttttttaaaagatggagtcttgctctgttgcccaggctagagtgcagtggcgtggtctcagcttgttgcaacctccacctcccggcttcaagcaattctcctgcctcagcctcccgagtagctgggactataggcgcatgctgccacgcctggctaattttttgtattttttagtagagatggggtttcactgtgttgcccaggctggtcttaaattcctgagctcaggcaatccacctgcctcggcctcccaaagtgctaggattacaggcgtaagccaccatgcctggcctctttttttttttttttaatgtagagatgagctctcaccatgttgctcagactggtcttgaactcctagctcaagtgatctgcccacctcagtctcccaaagtgctgggattagagacatgagccattgcacctggccaaaaaaggaataaatatttaaaagatgtttttaaatgtcagccagctgagtgagagtatagaaaagtaacgcactcgccacacactgctggaagctgtagatatggcacacttttgaaaaacaatttggcagtatttatcaaataactttaaaacatttatatttttttttttgtgtggagatggagtctcactctgtcacccaggctggagtgcagtggtaccatctcagctcactgcagcctccgcctcctgggttcacgcgattctcctgcctcagcctcctgagtagctaggactacaggtgaccaccactatgcccggctaatttttgtatttttagtacagacagggtttcaccatattggccaggctgatctcaaactcctgaccttgtgatccacccgcctcggcctcccaaagtgctgggattacaggcatgagccaccgcgcccggccacatttatattctattatcctttaatctcatttctgcaacttatacctaaggaaatagtctgaaatgtaaaaaaatgattttgcaccaagatgttcaccacagcattatttgcagtagggacaaactagaaaccacctaaacgtacaataatagaaaagtagaatgtttgagtctatcacagcccattccacacacagcccttctcatgtctctgtgccccacagcagaccacatggtaccactcccagccatagactggaccaaggggtacactcgcctctagctgcaccaatcagagtttccttctttcagaaatgtggaattgggagacagggatttgtgtcagtctctcctaggggcttgaactggaagatgttgtaaagtcagagctgggacagcccacccagtccttgtgcaaatgcaacagagagagaaacagagaaaaaggaggaatatgatatcagagagggtgaagcttaaagagaggagaggaagacagggagaagctgctgaggttgtcaggttcctactcttgggttttataaaacatgccatccttcaaatacatttccttccctttctgcaaagttaacttatgcacattctaacacattcaaataatgctcactaacattcaaataaggtttactaattaacttataagaaactgatagcaggagtggggtgtgaaagattctcagaggaaatgtgagcacttaggtgtgaagtcttgatggggtggagaagtggtatgcccgctaatgtttaacaattagttttccaggagtgataggaggagccccgatttgtagtgtttaccaatttttatgctgtaaatcctcccactgtggccaatctcaaggtaccaaggtgatgttaaacacagagatgtggccaggcgcggtggctcacgcctgtaatcctaacactttgggaggccaaggtgggcggatcacttgaggtcgggagttcgagaccagcctggccaacatggtgaaaccccgtctctactaaaaaatacaaaaattagccgggcatggtggcaggtgccttaatcccagctacttgggaggcagagacagaattgtttgaacccaggaggcggaggttacagtgagccgagattgagtcattgcactcaagcctgggggacaagaacgagacttctctcaaaacaaaaacaaaaacaataaaaaaaaaaaaacccacagagatgctgacaattggctcctgcaagccaaacaagctggctctagcacaccactgggtggcaggagagcagtaaggccccttccctggaggggatgctggcagtctctggtgggtggagcaaaagctgctagttaagccatgctcactagtctcttggaattcagaccatgtgaccatcaggtctgtgttgttccaggtctgggaccttccaactctatcctagaccagcataagaacttcctggaacacatggccatatccctgaatttttattttatatatatagatatatagatagatagatagatagatagacagacagacagacagacagacagacagacagacagacagatagataattttttttttttggtgagacggagtcttagtctgtcacccaggctggagtgcaatagcacaatttcagctcactgcaacttccgcctactgggttcaagtgattctcctacctcagcctccagagcagctgggacaacaggtgcatgccaccacgcctggccaatttttgtatttttagtagagatggggtttcaccatgttggccagactggtcttgaactcctgatctcaggcgatccacccacctcggcccatatctctgaacttaaaaaccaaaagagcttggaccttatatactaactccacctactaagagaaaggacagatcccacccacctacctcattgggaaggaccacggctccatctccgtcccggaggacaccatccttccccacctgggggagcatggtgagtctgacctcctcactgctgcccaacttggctgccttcttgttcaggatcctggccacaccctctggctgatggtagctggctggggagaggggctctggcttcttggtgccctcctctcctgctgatgaggtggggctcggtgcccggccacacacattacggaagaattcctgcacaatgccgtacttgggaggctcgggcttggcccgcgtctcagacatgcctagtttccagacagactccgtgctccctgagtgctccaccacactgaagaggctggagagtccatcgttgatgtttctcaatacagggctgtcccgcgtggtggtggagcgggcccaggccgagccgttctgcttgccctggtgcaggttccacaggctgcggtccttgctgctgtccagcttggacacagaccgcctctggagctttggtgagccatacttgggggagcagcagggccgctcgatgcgcgaatggaccttgtccagggaggaggagatctgcttgctgcgcacagacacgagcgaagagctgcggggtgaccaggccttgccatggaggctgctgcggggtgggtcggtctgcaggcccacgctgaccgtgcggatggtctgtgtgcccacactggccaggcccaccgtctggctggatgtgctcttcactttcctctccagtgagccggagcgcatggcctggcgcacacagttggtgatctccttcatgtcatcactcatgttgcctgacatctcaaagtcatgcagggccgctgggaagccaggcccggccgccgaggggctgcccgctgagcctccgtccaggcgctgccgtgagaagttgcagagccaccgaccataggagctctcagccagcccatcagcctcggccgactctttgggcttggctgtggtgaagaggaagccgggctcgataatgatcttgccctctttgtcatgaaccacagggactccgaggcgccgggccaccgggggactatagtagactcggatgcccgtcttgtcaggagccgtgtagctgcgctgcatctgcctccctggggggtcctggcaggccagggcacccaggtggttgcagtccctcgacgagagcccaggcttctccttggtgtctttctctggatcccctggctcggagctcacaaagccaaaggcagggttgttaggcagcttcttgccccgggcatctccgccagcaaggtaaggggaacagtcgagcaaactttcaaactcagacatggaagaaacagatttggttctgcgaaggacagaggaggaaacgtcgttattagtggaaataacactgagggcacactctggtctaccaccctggtccgtgtgctgcgtgagggcaaagaccaggaccgtcttgttcacctcttgtagagatgttgttggtgcccagtcccacattctgtctgcattttcttttttttttttttctcccaaacaggtcttgatatgtcacccaggctggaatgcagtagtgcaataatagctcactgcagcctcaaactcctgggctcaagtgatcctcccatttcagcctccagagtagctgggactacaggtgtgcaccaccaaacctggcttttttttttcttttttttttcttgagacagagtcttgttctgtcacccaggctggagtgcagtggcatgatctcggctcactacaacttccaccctccaggttcaagagattctcctgtctcagcatccggagcagatgaaattacaggcgtgcgccaccacgcccagctaatttttgtatttttagtagagacggggtttcaccatgttggccaggctggtctggaactcctgacctcaggtgatccacccgcctcagcctcccaaagtgctgggattacagatgtgagccactgtgcccagcctaacacctggctaatttttaaaaaattttttgtagagatggggatctccctatgttgcccaggctggtctcaaacttctggcctcaagagatcttcctgcctctgcctctcaaaatgctgggattagaggcatgagccactgcacctggcctctctttgcactttcacctatacacctaaaactgcatactctgaactgcatactccaccattctctatctgatggtttttttttctgcctgtgggatcatacttggctgtcctacacatagaagaagctagacccagcactttgggatgctgaggcaggcagatcacctgaggtcaggagtttgagactagcctgaccaagatggtaaaaccctatctcttagtaaaaatacaaaaattagccaagcgtggtggcgttagcctgtaaccccagctactcaggaggctgaggcaggagaattgcttgaacctgggaggtggaggttgcagtaaactaagattgtgccattgcactccaccctgggagacagagcaaaactctgcctcaaaaaaaaaacaaaaacaaaaaaaacaaaacacacgcccaaaccgaagctagagatagcacagagttaatgagttcacacccctaaacacagccctcaacaaacaataggtgggatatggtgaacaagtgccccagcctccttgtggtgggatgactctaagctgcatgttctcctctggctccctgagttcctccgacagcctgaactccagttgcccgtggaataacctggttgaagctccttttatcggctgctttcccttccctgtctcacttccaagtgtttcctgaaattctgtcccaaataaaccatttgcacttaaatctttgtctcagggtttgcttatgggggaacccaaactaagacgccatgaagctcctggcacacctattgcctgaatcactgaacacaccaggcatatggaaatgcacgtgtcagaccactctgattaacttcaagaggcagctcctatcatccccactagacagagatgggaagtactgctcaaggtcaaggtcatagagctagaactggcagggctggcattcaaacctggccctctggctccacagcctgtcccgcctgccttgcttctgggctggtctgatagcggctgggggttctgtttccctgactcctttcatgggtttcctaacagtggagacgtggtccttatggtcttggggtgggggtctccttggccatagcacagggctgggcccaaaggatgctgctcaataatcccaggaatagaggtcaatcttgactctcctaactccagaggcaggagaaaagaatcccaagaggagcaaaatgttttgtttccacctgtgttccattcccggactcaaacaacatgcagcagcctggaattcccactgccccaagccttccagctcctgagtggctcgggttccagagaaaccatatcccgatgctctcccaacttggatgcggtggggtggcggcaggaagagggcaaaggggcggggcagggctgcggtgaaagcaggtagagtgggtgcagggcgcagcaggaggtggagaggggcgaggctgtggggccggtcagagaggcagagcaggggaccagcatgcaagcacctctttaaaccatttcctccaagctcaacttcggaaacagcctccttgtcgtggatcttctcactgcgtgtctgtcaaggaagagagacaggaagggtcagttctggccaccagagcactaagggcatggaacaagagaccagccccgacctcagtgcttgaatctcctcatccggagagcaggaatgatgtcatcaatgatctagcatggtcagtttctggctgccctgcatccaactcccccaccatatgtgatccaggctgggccaatcagagctccaagagtgacccacccaaggaaagggaccacttaaaatttaatccaaatgtggtgactgcaacaaagcatccagtggtccactgctcagctggtggtgggcttgtcttcttcctcctcaaccctaccccctcacttagcccagtccctgggtggttgggttttttttttatttttttgaggcaggaaccatgagatacagactccagggctgaggagcccaaggtgcaagggtgtgacctatgagacagggttagcaacttcctctcatgtcccccacaagcagggacctttatggtgcagccaggagccaagatagcatggcagcagccgccccactcacctccttccagctgttgtcctgcttctccagctccgagtgcttcaggacccaggggtcggcagccttctgcagctgggcaagggcagagagggtgggtcggtaatgggcaaagctggtatgcaggaccctgctctaagcaaggccattccccagactccactctgcagcccacagaacctacatcatggacaaggggccaccttctcagtgggtagcagctcagagcgccccactctgcctggtggatttggaaaatgataataaaaggaactacttgcaggcatccttctagatgtcattatacctaatatagtaacagccatgactatgtgaattcatgttacaattcacagaacagctagactagctaagcagcagctacatcccatcagagtggcaaatgtaagatccaggcacccccactgctccatccacagtggccgtcatttatggatctcggcactttttcctgctgggccttgaggggcctctgcttctctcccctctttggagctccatcacttccaggtggcttgtgatggaacctatctcctatgcacacattagttaatttttttttttttttgagacagggtcttactctgttgtccagactggagtgctgtggtacgatcgcagctcactgcaaactctgcctcccaggttcaagcaattctcctgcctcagcctcccgagtggctggcatttacagggatgagccacctcgcctggctaatttttgtgtttttagtagagacgggtttcacatgttggccagcctggtcttgaactcctgactcaggtgatccgcctgcctcgacttcctaaaatgctgggattacaggtgtgaggcaccgcgtctggccgcattagttgatttaatcctcacagaaacagtgtatgataggtgttcttgtggttatttccatttggcagatgagaggatcaagactgagagaagaggttgggcagctgactgagtgaatgatcgtgtagcacttcccattgttggtggctccatctgtaccatctgacactacagccttctctggaggattgccttgggcaattagaaccgaatcactgccaatgacagacaaagacaggggtccaaaagaccggcccaaaaggcagaccccttgccttaaggtggaccaaactgtggggtgatttactgtttacactcctgggcatgtcatggggtcaggccgagggcagacttcatctgaaagcatatcttacgtggtttcttccccttccccatcctgactccatccgttaacaaatcacttgcacacagggtaaccaactcatcttggtttgcccaggactttctcagtgtttgcattgaaagtcccatgtcccagaaccctcagttctaaaaaaaactagtaggctacggctaggactattctagttttaaaagtcaaagtcccaggaacgcgctcagtcccaggcaagccagcatgggttggtcaccttacttgtacttgaattcatgtctagggctttgcttctaagaaactcaacatgagacaaacagtaataagggcaacaatgaaaataacactaggccaggtgtggcagctcacaactataatcccagcactttgggaggctgaggtgggaggatcacttgagcctagcagtttaagatcagcctgggcaacacggcgaaaccccatctctacaaaaaaatacaaaagttgccgggcacggtggctcacacctgtaatcccagcactttgggaggccaaggcaggtggatcacctgaggttgggagttcgagaccagcctgaccaacatggagaaaccctgtctctactaaaaatacaaaaaattagacaggcgtggtggtataagcctgtaatcccagctgctcaggaggctgaggcaggagaatcgtttgaacgcgggaggcagaggttgcggtgagccaagatcgcgccattgcactctagtctgggcaacaagagtgaaactccatctcaaaaataaataaataaataaataaataaataaataaataaataaaagttagccaggcatggtagagtgtgctcccagctgcacgagaggttgaggtgggaggatcacttgagcctgggaggcggaggttgcagtgagctgagatggtgccactgcactccagcctaggtgacagagcaagaccttgtctcaaaataagaaaagaaagaaacgaagaaagaagaagggagggaggaagggagggaagggaaggagggaaataacactaacatcagcaaacagcaatgagagatgaagaccatagaatcaaaccaagccccagacaggggtgggcttaagaagcactttgaatcttctggctatctcactttatttccatagctgccttgcaagatgagaaggtcaagaatggtcatccttattttacagatgaggcccagagatcagaggtgacttgactggggttgtacctggtggagccaggtaaggactggggactcctggtcagaagctctttcccaccagccactctgttgctttcaccagtctggcttaatcgtcagtccagtgtaaagaagaatgctgctttgggggatttggtttaaagtgcaggaggcagaagaatgtcagagacacaagaggctggagctagagggccggcaagtctctgatgtgagaacaacagcagaacatggaacccgtgccctgatgagctgacaagacacgcctgtgggctgacatgttccccagggatgacatgaagcttgtttcataatttcagaatcattttagaaacattttgttgttaatataataagaaggaattattcttttatagacaggaatttggtttgatggtgcaaacagatgcatgcatctgacctgctttccacatggtacctggatggttctgggatttgttagtcagcctgccatcctgcactccccaagcacagcctcctagcaagtgtgaacctcaaaggagctctttacctgcaggaaagtgggcatggcccaggaccaggaactttccagatctgggagttctgccagattctggtcctctcccttactcactttatgaccttgggcaaatcactttgcctcagtctcctcatctgaaaaaggggtttcatgaacgtgaccttgcaaggctgttgaagtactgaagagaacattaggaagaggaaatacctaagatccataaactcatgaaaaatgctcaccttcagtagaagtcagagaaatgcaaagtaaagcaatgagatagcatttcacaccctaacttgggcagacatttcaaagattggtaatcacaggaactggcaaagataaagcaaaaagggccttcttgtccttctcactgtgcagctggcaggagggtacatgggcaaagcctttctagaaggcggcctggcagttaccatcaactataaatgcatatgcccttggatttagcaatttcacctctaggaatctatcctactgaaatattcatgcgtgtgcagaaatatatgtgtggagatgttcactgaggcacaacttgaactttttttttctttttttagatacgaagtctcactctgttgcccaggctggagtgcagtggcatgatcatggctcactgcagccttgatttcctgagctcaagcaatcctcccaccttagcctctcatgtagctgggactacaggcacacattgccacaaccagcttcaggtcacaactttcaatagtgaaaaactggaaacaatctagatttaatcactgtagataacaaatcatagtatctccacactaggaacaccaggcaccagtcacactgaataaggaaggcctccatactcttgtgaacagctctccaggaaagacacaaagtataaataaatggacattaaaatttgattgatgattaaaaaacaaacaaaacaaaaccctgtaaatataaatttaaatagaaagaaaggcccagcgactcgggaggctgaggtaggaggatggcttgagaccaggagctcaagtccagcctgggccatacagtaagacctcatctctcataaaaaaaaaaaacaactttttttcattaaaaaaaaatgacaagaaagggagggagtaggctgaaatgtacctttgtaatatgtgaacattatataaagatgaagtcctgatttacgtaattaaaattaaaagtaaggccaggcgcggtggttcatgcctgtaatcccagcactttggaagaccgaggcgggcggatcacctgaggtcaggagttcgagaccagcctggccaacatggtgaaccccatctctactaaaaataaaaaattagccgggtgtggtggcacgtgcctgtaatcccagctactcgggaggctgaggcaggagaatcacttgaacccgggaggtggaggttgcagtgagctgagatcacaccactgtactccagcctgggcgacagagtaagactgtctcaaagaaaaaataaataaataaaaataaataaaataaaagtaaggccgggcatggtggctcactcctgtaatcccagcactttgggaggctgaggcgggaggatcacttgaggccaggagtttgagaccagcctggccaacatggtgaaaccctatctctactaaaaatataaaaattagccggctgtggtagcacacgcctgtaatcccagctactgaggaggctgaagcacatgaatcacttgaacctgggaggcggaggctgcagtgagccgagagtgctctctagcctgggtgacagagtgagactctgtctcaaataaatagataagtaaataaaaataaaagtgaaagaaagggaaaagtcaaaatcaagagtggagcagagcagcctatggtaggtggtgcctggctgcatgaagtgaactataatggggagtgagggtcaatgattgcttttcctttcctccttcttttgattggaggcctcccaattttcccatgggaaccactcttagttcctccctcttggttcctgggtttgggtaggctccaggggtgggcacatgactcatatctggccaatccactgtacttgctaagctgtaagatatgagcatgaaactaacagtggccatatttgggaatagcttgtttaagagtaaagctaacacagaggaaagcaggcctgacaggctgaagcagaaagaaaaatctagttcccactgcattctctaagtgcctggatccagctatacctgaaggagatggtgtgccagacctcactggatgagcacctagatccagctatacctgaaggagttcctgcttctgaatcatttctgtagcaactctcccttgcgggtggaagcggcttggcaggggtgggcctcacctggcttaggcggttctgcagctccttcacctgctgctccacctgctgcttctcaccctgcagccgctccaccagctgcagcttttcctggctccagttgcgctcactgatctgcagctgccgagtcagctccatgacagcgctgtaggactcagctaggaggtgctgctgctcctcacgctcccgctgtagggctgccttccagtcgggccctgcccgctccccggcccccttccctgtcttcagctccatctgcggaaagaagcagactaagcagctggcagcaggaggccactcctcttggcccttctctctccttccctcctgggtgccagcggggaaaaggggagaggtcccctcagaagacccctcactagggactaacccagcttagtcctccccactcagaactaacccctaacccctccacacaataagggtttgaagagctctttctataagccatgctcttctgtgggcttttcaggcatgatgtcagtatcctcataaaaactcagaaagattactagtggtcattccagcaagatggttttcttggcctcaaacctcagagtggcaggaaagggaatgtgcaacctttagactcaatgccccccattaacccccatgagctggtcaggttcttggtgggaggagcacctgaaatgcccaggtctttgggggcagcaggtgcaggggacaccgtggaatatgcagatggagggagctgtgagatctggaagagggttaggaggggagagtagtggccccaggaagtagccaggagactgtgagcagtgggaagaaggtggaattggggccgggagtggtggctcacgccagtactcccagcgctttgggaggctgaggccggcagatcacttgagatcagaagttcaagactagcctggccaacatggtgcagccccatctctactaaaaatacaaaaattagctgggcatggtggtgtgccatctataattccagttgctttgcaggctgaggcaggagaatctcttgaacccgggaggcggaggttgcagtgatccaagattgcaccactgcactccagcctgagtgacacagtgagatgccgtctcaaaaaaaaaaaaaaaaaaaaaaaaggaggtggaattggggtcacagggagccaggggttagaggtttgggggagcaagggccagtctgacacttattagccgggtgaccttgggagataaatttaactcctctgtgccagttttgtcatctgtccagcagagaccatcggagtgcctgcctcccagaggctgctgacgcctgggaaggcagcttgcagcaggggcaggctggatggaagaagctggagcccaagctgcagggtcagagcattctctctgagtgggaagaagcccaccctctcacttttcaggccaaaggaggcagcaagtcaccctcaggcacacagcagacaccaaacccccagggctcctggttaaggctcctttgggggcacgctggggagttgggaggggaggcccccattttgcgtggagggagcaaaatagagccaggcagttggggctgagggagtgcttatgaggaaatgaaggagcaaatgaggacagcaggcagtggggatgtgcaccagcctcacctgtgagcccagggcgcaatcccccaccttccttcccttcctctgtgactcccattccccaccgtttctgatacccttgctgtgtgactttaggcaagtctcttgccctctctgggccacaggtgaagcaacggcattcttattcctctaggagcatggccttggtattctactcccagatctgacagctaaaggcttggctgagagtaaggggagaggcgtctgacaggtggggggctcacctgggaggtatggcccttgagctctgcccgctctgtctcccaggtagccttggccttggcaaactgttgctgaagctccgtcagaccacggcgttcatcccggagcagccagcacagctccttcagcgtcaccttcatgtcggccagtgtcttgatgtactcattgggctgcagacaggaggcaaaacctgagtcaagagcctctgtggggtagggaggggaacctgggttcagagaactcacctaggagtccagcttgggacttcacgaggcctcaggcaagtcccacaacctccctaggtcatctcacccataaaatgggaatgacaggcccagccctggctacctcctaggctgacatgaggcccaaatctgacaccaagaaaaaaccctgcagttacagtaataattattcagcctaactctgagctgaatcatctggcttcttcaaggctctgcagcgtctgtgccgtgggtccttctcctcactcaggatctgcctctctgacccgctgcaggccagatgtggggtctaattcatggagactccctcagtttgcctgattctgtcccaaatcttctctcctgggcccatgccctcatttcccatccctaccccagctcaccgtgtgtgaccctgggatcctgaccccactgttctctctgacttatggcttgatttgaaggttcctgaccctagaccacaaggcccctcttcagatgactctagcctgatatccttacccttaccatgtacctcccaagccatactcaataccagaacaccttgccacaccttggcacacagagttctcttggtccagaatagtctttcccctattctctattaggtaaactcctatacatccttcaaaacccatcatccatgaccccttcaccgtgatattgtcccctatactgcaaagagaattacttgctgtcttgcctatgaccccacagtccatcatctggactctgttactgccctgggatgaccaggcaataacttgcaacttcaatgtccaggaatggggtcagagaaagcagtaggaattgattactgagcagacaaaggaatgaatggacacaacaggaccgggaaggggctggaaacacaccgtgttctgggtccagctgtcccccgtgcaggccttgttatcagaatgctgagcgtttatctcctcttcctccatcagcaagtacagctccttcatgctgttcacctgttttttaaaaaccatgcttaacagcaggtgggaagttttcccaaattttaattccaaccttgggcaccatgtaggtcgaggagcacggctggatagtcaggccctcctagcctcccacgacatctattctgccccaaagaccaggaagcatccctgagagtcactctgaaataaccatgttgacaggctgggtcaaggcaggcactgtggttgaaatgaaaaggccacacgcactcccacaatgctacataagggtgaccaaaggtttgggtggacagaagggaccttgctggggggttggactgcttgctgatagattctgggcaagagtccagggccagccaaggagatcagggacctagttcaggatggaaataagacaaaagggagcgagtcaccttctgtgctcaagcaatcctcctgcctcagcctcccaaaatgctgggattacaggcgcgagccaccatgcccagcatgattatgtttatatcttattaattatgcttattttggtaaatgtatatatttcttaattatatatgttatgtaattttctgtgtctctttattttttttttgagatggagtctcactgtgtcatccaggctagagtgcaatggcatgctcttagctcactgcaacctctgccttgcaggttcaagagattctcttgcttcaggctcctgagtagctgggactaccagtgtgcaccaccgttcccagctaatttttgtatttttagtagagacagggtttcatcacgttgaccagactggtctcgaactcctgatctcaagtgatctgcccaccttaacctcccaaagtgctgagattacaggtgtgagccactgcacctagccaattttctatgtttatgccctaattttttttccctaaagtaagtttctctctcttttactctaggatatggaaatggctagaaaggttttcaccaaatgtggagggttcgtctgagacaaactgacttaaaatatagactgtgtggcctgcaggtcattcccttaaactgggcttcatccagaggcctgtgagacttccaaacaggtgagagggctcctatgtttccaaacgtcacagaagagacagcttcggacaggaggaccgaggcgaatgctcccaggggcggccctgtgtcaggcactgcagggccagggcagcagggtgtgggcctatggaatggcggtagtgactctcccatgaggccctggggaggagctggtggcctgcgagaatgatgagccccactgagatagggtgatgcagggtcttgctacacactcaggtctaactgtcttgcctggctcctggggcatctgggctcctctggagtacccctgatggcgtaagtggcaacttgaggcatgccaatgctccctactggatctggacaggggactacagagagcagcctggactagaggagggccaagcctgggctagactcgaggtacctgaacccaaaaggacacggccaaagtgaacaatgtcaactaagatgagtgtgaccaaggtctgacatccttgtaagtccccttctcttccctgatgtgttgatgtgtgctgctgtgctgatgacaggacgcaagggctttgagcagcaaagggtcctgcatagactggggcatgaatgggtcaggtgggtcctttctaagcttcttacattcccagagctccgcccccacgtttcctgccacatcctaataccacctgtactatcaccaatgtttttaagccagcctactccctcttgttaagtaaacatatcttttggccaggcatggtggctcatgcctgtaatcccagcactttgggaggccaaggcaggtggattacttgaggtcaggagtttgagagatcagcctggccaacatggagaaaccctgtcttttttttttttttttttttttttttttgagaaggagtcttgctctctctcccactctggagtgcagtggcacaatctaggctcactgcaagctccgcctcctgggttcacgccattctcccgcctcagcctcccgagtagctgggactacaggcacccgccaccacacctggctaattttttgtatttttagtagagacggggtttcaccatgttagccaggatggtctcgatctcctgacctcgtgatccacccgcctcggcctcccaaagtgctgggattacaggtgtgagccaccgcacccggccaagaaaccctgtctttacttaaaatacaaaaattagctgggcatggtggcatgtgcctgtaatcccagctactcgggaggctgaggcaggagaattgcttgaacccgggagatggagattgcagcaggctgagattgcaccactgcactctagcctgggctggagtgagactccatctcggaaaaaaaaaaaaaaaagcaacgaatgcaggaaggaagcctgcatgctgatggcaggtatgtgagcctaggagttgtgtcaataccagctgggcgtcccttccctgtccctctctccccagcccacactcccagtcccagtccctggcccaatcttacctcgaggaagtcatccccttcgctgggcaaaaccttgccctgccgccagcgcttgaggaaccacctgagcttcatgaagagcagcaggaagttgtgcttgaattgctgggactcctgcaccagcatgttcttctcctggctccagaatttctgctccagcctccgctggaggctcagactctgcagctcaaactcccgcctcaggagcgccctctgctggtcctccttcagctgccgggggacaagagcttgagcaaccccagggccctgtcctctcccccacccctttctgggcccctggacaggggcagggaggaaagtctgggtggtgcctgtgagtgatccctgccggggatcccaccacacgtggcgcaatctattcagatgagcactgccctctgctcctgcaaaaacagtgacacatcattgaaggagctgggatttgaccctggctctaaaaaaccatgacatcatatactgagcacctcctgggcaccaaatgtctcacacgaatgctcatgttcaatgaggaacctgcgagggtgagcgatgatagcagggaggggtgacgcatggagagcaaagggcgtgccagggttgaggacagctgatgactaggcaacaccctaggaagcaatgcagtgtcatgcctaacagagggacctggattagaggcccagccctgccacactctggatgtgcaaccctgggcagagcactccagctctctgggcatcagtttccccatctgcaaaatggtgataagggagggcacaaggattaaaagacataatgggtagaaagtgcattggacaggcccaccatacagtaagggcttaacaaatgttattccagaactattatcttgattagaagccaggcctgatgagggcaccatttcataaatgggaaactgaggtcctgagagaaaacaggactggccccaggtcccacaggccgccaatgacagccctgttacacaactaatgcacaatggcaaggacaataacatcccagcagggcacaggggctgaagactcaggtttcccttgacattctttcattctttttttttttttttttttttagatatcactctgtcacccaggctagaatacagtgggatgatctcggctcactgtaacctccgcctcctgggttcaagcggttctcttgcctcagcctcctgagtagctgggattacaggcgtgctagtgcacgcctggctaatttttgtatttttagtagaggcggggtttccatgttggccaggctggtctcaaactcctggcctcaagtgatctgcctgccttggcctcccaaagtgctgggattacaggcgtgagccaccacacccagcctcccctgactttcttgacttcagagggcccatagatcctcaaggcctctgcttccagctcagagaggctgtaggaatagctgcctggaaagcgctgggcaccacgcacctggaccattttctggttgaaattgtcggcctcctcctttcgtagctgccgctcctgggagagctgctcttgcaagccccggaggctgtcgtgggcctcagccagcaccagctgcagctccttgatctgtggtacagacaggggacacagataatgaggagggagagagaggaagaagtggatagaaattgtgatctaaggatgacagtggtaggggaacgatgggatgttggacccaagctgtccaaatacaaatcaggcagaatgactgtccccacctctgagggtcgtcatgatgattaaatgaaacagtacatatcaaatctggcttttgttaccattggaacttgttcttttctctctgaaatttatcttaataaggtactgggaaaactaagtttgattcacaaagatgttcattgtttcattgtttataattgcaatattttagaaacaacttagatactaaatgatgggacttaaaagatgcttaatggatctatacatatgtaacaatccattcagtggtacccttaaggacagtgtcctttattgtatgtatgttattatgttatactacaacagaaagtagaaaaacaaaaccaaaaacgctataggcctccataaaaaaacatacaaaggacatggacacacacaataaatgtaaccagtgggaactatgtgaagaccttctgacctccaaccttcacccaccctcccctccttctctctctccctctctctctctctctctctctctctctctctctctttcaacggagtttcgccagctttgagcgtgatcttggctcactgcaacctctgcctcccaggttcaagcgattatcctgcctcagcctctcaattaactgggattacaggcacccgccaccacgcctggctaatttttgtatatttttgatagagacaggattttgccatgttgcccaggctcatctcgaactcctaggcttaagcaatctgcccacctgggcctcccaaagtgctgaaattacaggtgtgagtcaccgtgcctggccccagaactcctacataaaaccttcctaggcatggcaaatgtccctctgtgagaaagtaaacattcattatatggtcaataatatgatgatttggcagtggaaggcacagtgacttgaggtatatcttctatatctgttttgcattaaaaatttttgcagggctacatactgtctgctgtccctggtttcctccctgaactcagtggtcaacagcactgggcaattgtcactactcaataaagagtggctgaatgaaacaaataattgaatgtgtgcaggaaatcattttttctacaggtaagcctatagaataggcctatttcctggcagggcacagtggctcacgcctgtaataccagcactttggaaggctgagacgggaagatcacttgagccccagagtttgaggccagcctaggtgacatgacaaaaccctgtctctactaaaaatacgaaaattagctgggcatggtggcgcacgcctatagtcccacctaactgggagggctgaggctcgagattcgcttgaactcaggaaatggaggttacagtgagccaagatcgcactactgcactccagactgggcaacagagcgagactcagtctaaaaaaaaaaaaacaaaaaaaagaataggcctatttccttttcttagaaaatgacaactaagttatctcagttttttctctttttgccatggcttccaggaagctcacttagagagtctgatccatcagcttcaagtgagcttctccttcccacatagtcatgggctgaccttcctgggactacagagttgtcttccaagagatgctcagaaaggtgctcaggctggaaaatacataggactctgcaaggttcagggtttcagggatactccacccagtccgtaggagccttttcctgcttcaggctcattatgaagagcaaggagaagctcagcaggcttagaaggggctcagaactacccagaattccctgaggatcaaagaatcctagcaattcaataactaccattcactctaaccctcccgttacagatggggaagctgtggccagaaggtagaaatctgtccaaggtcacacaggaacactggtagaactgagacttgaactcaggtcccctgagtcccagagatgtgtcattatcatcataatcatcctcctcctcctcctcatcctcacccaatgtggaccatgccttaagctatggcttttcatgtatttaatcctttcaacaaccctgtgaggcaccttcattttacatgtgagaaaactgagaatcagagaggtaaaatgacttatccaagatctcacagccagaatagagtggatccacaattgaaacccaaactgcctggctatagagactgctgccttcctgctacatacatgagtagttccattaaattacataaattgttaaattcccagtggaatttagtacagaagaaaaaataatttatgcagatgagtttataagtttccttggatcaggccatgagaatgtcccaaacttccttatttcccttctggccttggctgccaagaagcctggaaccaaatggaatgccccaaacccatatcctcaccagctaagtgatatatggaccactctgcttttgacagggctcagtcactctcctcctacccaatcccatgcttgctcaggcctagacccacctcagaggcataggaatcattgtcttcagctcggtaaggcctgaagctccggctggggtcgggcttagagtccaagtcaccagtgcggaaagcctctcggatcctgggctcccattccggcaggtccctgaagtcaggtggctgcacccagaggcacaggcagaacaaaccaaagatcaccatggggaggggcccgaggggtgccagaaacacccaccccaggcctctgcgctccctaagaggcttgaaccacccacctgagggctgggaccctggtagattcacctctgcaacccagacccagccccagctgggggcactgctgccgtttaatgaatgtttgctgaaaggatgaatgagtaggtaagtgcgaagtgattttctgaatgtgtgccttgtgcacaaaccttttgagtcagcccaaactgtcctatcacatgtgtgacctctgttcatccctctttcaagaagaaccaaaagggagataacatagagcagtctatgggcacagtggcatgtgcctgtaattccatctacaatttgaggctacagcgagctgtgatcataccattgccctccagcgtgggcaacagagcaagactgtttctttaaaaaaaaaaaaaaaaaaaaaaaaaaggcaatgtgcttgcttaaaaaagcaagatgaaaccggatcaacaggtcttgagttaaagaaattatggcacatatccactgtatagttgttaaaaagaaagtgctaaatctcagaagggcacgatggctcacacctgcaatcccaacactttgggaggccgaggcaggtggatcacctgaggtcaggagttcaagaccagcctggccaacatcgtgaaaccccatctctattaaaaatacaaaaattagccaggtgtggtggggcatgcctctaattccagctacccaggagacggagacaggagaattgtaatttcagctacccggaaggcggagacaggaggcggaggttgcagtgagctgagatcgtgccaccgcactccagcctgggcgacagagtaagactctgtctcaaaaaaaaaaaaaaaaaaaaaaaagataaaagaaaaaaagaaagtgctaaatcgctctctttccctggaaatgaaaaattccctgccattgctctgaggatgaagatcaaacctcccgcatgctcagtgcagtccagcttcacattgtctcttcactcagtgtcctggacacaccacgctccttccgcctctgatctgagctgtgtctttgcacaggctatttgctctgctgaaaacactgtgttcccccagccatccatccctctgacctctggtcagatcagaggccttccctcagcatagggtctaggtcaagttccttgttcataaaaccatgtacgcttccttcagattcctctctcagtgtctaattgcacattcactgacatgatattttgggtgactctgccccactagatgataaggaccatgagagggggaatcatatctgtttttgctaatcatgacatcttcagcagtgagcacaaaaactgtgtgaacaacagacaaggcatcataaattaacaaactgatacattgcgttaaaaatataagttgtgtagtaacaatagatataaagcaatctgggtggaaaaacaaatatatgatagatgtgtagagaaggatttagaaggacaagctgcaaggatgaaatattctagatccactctactagacacacacaaatactgaacatttaaaatgtgactattaggccacacacagtggctcacacctatagtcctagcactttgggaggctgaggctggtggatcacttaagctcaggagttcaagaccagcctgggcaatatggcaagattccatctctacaaaaaaatttaaaaattatggccaggcacagtggctcacacctgtaatcccagaactttgggagacaaaggcggtcggatcacttgaagtcaggagttcgagaccagcctggccaacatggtgaaaccccatctctactaaaaatacaaaaattagccaggcatgatggagggcgcctgtaatcctggctacttgggaggctaagagaggagaatcgcttgaacctgggagttggaggttacagtgagccgagattgcgccactgcattccagcctgggtgacagagcgagactccgtctcaaaaaaaataaaaaataaataaaaattagctgggtgtggtggtgctcacttgtagtcccaggtactcaggagagtgagggggggagaatggctagagcccaggatatcgaggctgcagtgaactgagattgcaccactgcacttcagcctggccagcggggagagaccctatctcaagaaaaacaaaacaaaacaaaggaaaaaaataaataataggatctgtgcatgaggcaccttacctgaaagtctgagccaaggtcttttgccagaagaatctccttagagagcccctgggagcccaaggggggcagtgatgagaaggactcctgctgttccttgacagagcacccgaggactgcatctgccttccgcgtgaaggcattcagctcctgctgcagcacgctcaggcgcaccaggatggcatggatgagcttggtgtccctggggccctcgctgttgtcgggggcctcatgcagccggaagtcagcacactcgttgtccagacacagccggaggccagccgtgaagccattggcatcagccaccaggacatcgatggccttactgaccagggcggcctgctctctcagcccaggcagcacctcggcctccctggctctgcagagtcggaccgcatgggactcgtgtgtctcgcccaggggagcaggcacacactgggcagagtccccggcctcggcgtccgtctccagcatgggccgcgtactctggcaggaggcgaggtcacagcgctggaggttggagaggagcacgcggttctcgtactgcagcttcttgaccttgccgctgagctcgccgatctgcagcttggcggccgccagctcctcctgtgaaggttcgctgagcacagaacaactgtcctccgacagcgccacgtccagctcgtgctccgagcggaacttggccagctcgttcagcagcagcttgttctggtcctcgagctcggcagaggagcgccgcagcagctcggcctcctcttcgacaaactgcaggtgtcgccgcagctctgccaagctctccccgcactctccgccacccagcgcggagaaggccaggcgtgcctcaggacccccacagccacctccatgatccttcatgtcgtccatctcagcccgcaggcctcggttctccacctccagctccacgatgcggcggctcagcaggttggcttcctcctccaccagcttcaggtgcaccttcagctcggtctcccgcgagtggggggcatcggccagctcctcggctgacagcgcgctgtccaggtccccatagagcgagcggtacttcagcagctcctccttcatgctgtcattctccttggcaagcttagtgagcttcttgcacatgagggctgactcctcctttgcaaagtgcaactggcacttcaggtctgcactgtcctcctgggaccacagagacagacacaacccaggaaggttagtgctgggagtctcagtaccagccatggcattttggggagcactatgtgctgggaacacagggatgaatcagacacagccagaccctcaaggagctaagggtccgggggagacgcagaggggtagatgttgaaatgacagcaaggatggggcgccacacatagcctgggagtacaggaacaggtgacatactgatgagcaactgctgccactacagtttcatcagtaaaatggggcggtaacattacctccctcccagagccacagacgggattaaatgagctaaggatgaaaagggcctggcactctgacaatcccataccactaggagctaacggtatgtggcctttgctgcatatagtacttcatccaattcttccaatgaacccccaagacagggatagataggaaatggagcccagaaactcaaaatgactcgctccaatcacatggcagtcaagtggcagagccaagattcaagcctgggtctccaactctagacctttggatttgactgtagtgctgcttgctaagttcctggctggggtggggagcgagcatctaagcatctaagaaccatgggctcaggatgtggttttgggaaataaagtgggcagtgaaactaagaaaatgagcaagggggccgggcgcagtggctcacacctgtaatcccagaactttgggaggccgaggcaggtggattgcttgaggccaggagttcaagaccagcctggtcaacacggtgaaaccctgtctctactaaaaatacaaaaattagccaggtgtggtggtgcacgcctgtagtcccagctactcgggaggctgaggcatgaaaattgcttgaacctgggaggtagaggttgcagtgagctgagattgtgccactgcactgcagcctgggcaagagagtgtgactccgtctcaaaaaaaaaaaaaaaaaagaaaagaaaaaaaggaaaatgagcaaggggaggacagggcagaatctgggatccccaggccacttagagtcaggctcaggtcttcagaataaaaccttcctacgggggctgctgggaattacctgcaccaaagtcttcttatcggccttccccagggagcgggttcctcttttcttcaaggaatgctgaagtgagatttaattaaaaaaaaaaaaaaaagtcaggactgaaagctcacagaatgatgcacatgcagagagctgtcacagtgcccagggtccagggagggccccagtccccaggccaccccaccctgatggcactgactgttgagtaagaggagccctccagatcacccagtgagcagcaatgggagataggccagaagcattggagaagatgattctaaaaacacctgctcagggctcctcccctccagcctgctcccatgtgtgacccagttggcctcggcgaagacttggaaagctgtgtttctgttctcatttgtctttcatcaaaggatttcctgagcacctatcaagcgccaggtaggtaggtgtagagaacacagcagtgaaccagggaggatgttgtggtgctttgcccagattccccttcggaactgagacactcattcccagagctgagacctcaaagctgagtacctctcccagcgacagccattggttgaggagaaccaccttgtccaagggcaggtgctatccgtggatggagcccacatccagggatgggtccatgaccccttgcctcagctctacagggagggccatcctagctccagagctccccatgggatcgcctgagatcactggtgtaattcagcttccagctctgcctcactccctgtggtgttgttcccaaggagactcttccataaacctctgcatgcaaatctccatctcagagaaaatcctgtcttcatgaaactgacatctagtgggaactgtaattcagaatgaatactaatggataaaatgaatatggaggctggatgtggtagttcatgcctgtaatcccaacactttgggaggccaagacaggaggattgcctgaggccaagagtttgagaccagcctggccaacatagcaagaccctgtctcaaagaacaaacaacaacaataaaatgaatataacaaatcgtaattacacatgaggcttagaaatggtcataagagactgatggcaaacagtgattcaaaaatccagaagctggtctggcatagtggctcatgcctgtaatcccagtactttgggaggctgaggtgagaggattgcttgcattgaggagtttgagactagcctaggcaacatagcaagactccacctcaaaaaaataagatgtttaaaatccagaagcaataggggaaaaaatagatacatttgattatacaagcaaattctgcatggaaataaaaacaccttaagaaaagtaaaaacataaatgacaaactctgaaaaaatatctgcaatgtacaacaccaacaaagggttgatatcctaaatatggaaagagtttcacaaacagagcattaaaaggccagcagacctgtaggaaaataggctagagatatgaaaaacagttcacaggaaaagaaaggcaaatggatcatggcacatgaagacatcaaggcacatgatgatattcaaccccactcctgttagataaatgcaaattaaaattacactgagataccgtttctcacctatcagattggcaaaaatccaaatatctgacgacatattctattggtgaagctatagagaaacaaaaaggttcataaattgctggcaagaatgccaaatggcacaagccctacagagggaattggaggaaatgttacaataacaattactgaaatttctcaatgtttaaagaagtcattcaattagatgcacgattcttttgagcgcttcctcccaagagaggaggggtgattcctggtggtggtgtatgtataaaaccttgcttaggttgttttgacttttcaaggtgggctggtatatttttgaaaatggccccaggtgatttggatacatgcttgctccatcccccacctctcacaccccatccctgaaagtgacagccactgatctaatctgagtcccatttttctgaaaccaagacagaggggcagggacttgtccaaggtctcacagtacacccacagctgacctgggaccagttcttgacatagctcttgaccaaattccaaagagttggtaggagaaaatgtgtcttctctgatgagggccagagtgtagccagcacagtggttctcaacctggtacacatcagaattactcaaaaaaaaaaaaaaaaagaaaaaatactggtggtctgaggtaggtctgagacatcagtatttttcaaatgctttcaggtgattctgaagtgcaggtcggatcctctgtgccaggcaaggagagctccagatggactcctaagtacagaatatcttagagctcaatcaaatcctaaagagaccttttgaaatgcaaatgaggcagggaggcagaggctgatatttcagacgctgggtgccaagagccaggagccagtatttgagaagtgctgacctgggagctttcaaaagctggaagggaagaggaggaaacagggctatgggtcagaaaacgagtccttccacaagagccaggaggcagcagacaagggcagccagtggggccctggacggggcacacagaagcagacccccgtatagcatgcaagggggtgctgtgggctcagaccatcaggctatggaaggatctaggcccacctattacaagctgagtgggaagggctgtggcctcagctgggagttgaactctggggcccttgcaacgctgagtttatgatccctgggtgaaccctttcctctccctgaaattccattttctcatttataacactgggccatggattaggtgaccagagccccaccaatgactgcagactccctggaggaaggaagtgaagtgacagagaggagagccaggggtctgcataggtaccaaggggtcaggcatcacatgtgaatgaatgagatcacctaaagccattcaaagtactaagggatcatgagattcactgacatggtaaagtctctcagacactctgttaagggaaagaagtgaccagcaaaacaaagcctataacccaaatatgtccaccaactttagaatggattaaaaaaatgtggtctatccacacaacagaatatttactcagccacagaaagaagaaagaaatggctgggtgtggtggctcatgcctgtaattccagcttttggggaggctgaggcagttggatcacctgaggccaggagtttgagaccagcctggccaacatagtgaaaccctgtctctactaaaaatacaaaaattagccaggtgtggtggcaggcacctgtaatcccagctactagggagactggggcaggagaatcggttgaacccatgaggcagtggttgcagtgagccgagatcacaccactgcactccagcctgggcaaaagagtaagactctgtctcaaaaaaaaaaaagagtttaaaaatatatagaaacctgcattgtatgagactagagaaagacctggaaagatacaaagcaaactgctgatgctgggtcaggctgaggagtagaattgaaggaggcagttagggaaggctttcttctttaatttatgggttttattatttctattatttttgaatagataacaaagttgcatggttcaacattcaaaaaggacatagaagaatacagtgaacccagtcacccagttatcccgccccaaggcaaccaacgtaaccagagcactgcagcttgtccttggaggtatgctaggcatgcatctgtgtgcttttctaatgatatttttgcttcactgagtttatattacttttttagattaaaaaatacatattctggctggatgcagtggctcacgcctataatcccagcactttgggaggccgaggtgggtggatcacctgaggtcgggagttcaagaccagcctaaccaacatggagaaaccccgtctctactaaaaatacaaaaaaaaaaattagccgggcatggtggtgcatgcctgtaatcccagctactcgggaggctgaggcaggaggatcacttgaacccaggaggcagaggttgcagtgagccgagatcacaccactgcactgtagcctgggcaacaagagagaaactctgtctcaaaaacaagaacaaaaacaaaacagacaaaatgcatattcttagccgggtgttgtggcatgtgtctgtagtcctagctacttgggaggctgaggtgggagaattgcttgagcccgcaaggtggaggttacattgagccaagatcacgtccctgcactccagcctgggcaacagagccagaccttgtctccaaaaaagaaaaaaagcatattcacgtttacatttaaatacacatatatgtatacatagaaaaacttattggaagtatatgcacctccccatccacacagaaattccctatggcttattcgaatcttctaatctttttctgctaagcacatactactacctgctggggggaagggaaaagtcattataaaaggtttttaaaatatactttccccaagaagtcaccaaacacctttccagcaggcagagaaaaggtgtgaatgagctgagtggcttgaatctcaccagaaagcagggttgggggcagaggagacgagttccacccttttctggtaggacctgacacttcccccaccttatctaagccatgtgggctcccacacagccctgccattctggagggaaaacaaggcgggctcagagtgcacaaagaccttcctcccctctgcacggcagcagctggccaggtggctggggggctgcaccccgcaagaaagccagggcctgtcagagcccctttgtggagcccccagggatgaagccagtctctgcccaagaggcagatgttctggctctgggccttgggagggcaggacaaggcagggcggtgcctaggccccagcaggaatgcagccgcaaggcctggggacatgcccagccctgaggacaaactctgtggcctggcatgcaacaggggcttccccactcgccagcaactcacaaggccatctttgagcagccagtgtggtacctctaagcatctccctgtctacaggcttctaggagaagcctgagctatgtcctcccttgtctttccttcagcccaggagagagctgcctgagcacagctctggaggggcctctgcactcaaacaccttcctgccccactttggccaagaaacaaaggccaaccttccaaggaacaaaatgaatcttctgccaaaacagcagggcagattttcaccaaatctggaggagatgtttggaaaggtctcactgaaagcacagactgtgcttcaggtacaaaatttactctagattcttttttttttttttttgagacagggtctcactctgtcgcccaggctggagtgcagtggcatgatctcggctcactgcaacctccgcctcccaggttcaagcaattctcatgcctcagcctcctgagtagccgagactacaggtgtgcaccaccatatctggctaattttttgtattttttgtagaaatgggatttcgccatgttgcccaggctggtctcgaactcctgaacccaagtgatccacccgccttgacctcccaaagtgttgggattacaggcgtgagccactgtgcccggcctactgtagattctagaaggaacttggggttgggggtgtacctcaaagatttaggcattcattcttcctcctgagtggctgaaatggccacagagagaggccatgtggctcttgattagggagagatcacttgggggagaaaacaaagagtgttttaaacattggccccaaatcaaatgtcacaaggacagatggagccaactgcacgtgaagattggcaacgtagctgctcctttcccgggcaactggcagctctagacacagagctccttgccagaggaagcagaaatgtatttatttaactaagacaaatgcttctccagacccgcagccctcacggtggttgtgacactaatgaaaataataagtccttagtctgtgttaagcactttacttgcttgtcttgtttaattttcacaaacacctctgagaagtagggataatattccaattttataaacaaactaggctgggtacgatggctcatgcctgtaatcccagcactttgggaagctgagaagggcagatagcttgagcccaggagtttgagaccagcctgggcaacatagtgagagaccccatctctttcaaaaatacgaaattagccaggtgtggtggcgtgcgcctatagtcccaacaacttgggatgctgaggcaggaggatctcttgagcccggaagtttgaggctgcaatgaaccatgatcgtgccactacactctagcctgagtgacacagcaagactcttgtctcccccaaaaataataataaaataaataaactaagcgctagagcagttatatcatttccgcaaggttacagtcacttgcaagtaagtgccaagtctggaaaaaaggcagaaccgggctttgaactatcagccccttcctagcccaccaggtaggaattccggatgagaaggctgtgccagggaaggaagcagtcacaggagtgggcagcctcttccaggtttctgaagacacaacagggtcctaggagagcaagggtggggcaaggagcataggggcaacaccagaagagtcagtgcgggtttgagagatgtggagtcctgggtttgaatcccatctttgtctttccccagtcacgtctacatcctgcagttctactccctgggatctacacaagagaactaacacagaatctcagaaacgtgcacatgaatgttcccagcagcattattcatagtagccaaaacaacccagataaatggacaaatctaatgtggtcatatacccacacaatggatgattactcagccataaagaggaatgaggtcctgctacattcttcaacatggatggataaaccttgaaaacctgatgctaagtaaaagaggccagtcaccaaagactccatttggatgaagcatccagaacaggcaaatccagagacagaaagcggatgagtggttgctgggggcaagagggaaagggggagtggggagtgactgttcataggcatgaggttactttttggggccatggaaatgttctggaattagataatggtgacgctacaaaacatcatgaatatactaaaaatcactaaattatacacttttattttttgttgtttttattttaattttttttttcagacagggtctcgctctgtcacccaggctggagtacactggcgtgatcttggctcactgcaacctccgtttcccaggctcaagcaattctcccacctcaacctcttgggtagctggaaccacaggcttgtgtcatcaggtccagctaattttttaaatttttgtagagacaagggtctcaatatattgcccaggctggtctcaaactcctgggctcaagcaatcctgctgcctcggcctcccaaagtgctgtgtctggtctgaattgtacacttttttttttttttgagacagagtctcgctttgttgcctaggctggagtgcaatgatgggatgtcggctcactgcaacctccagctcccgggttcaagcaattctcctcctatttcaacctcccaggtagctgggattacaggcgcccaccaccacacttggctaatttttgtatttgtagtagaagtggggtttcaccatgttggtcaggctggtctcgaactcctgacctcaggtgatccacccgccttggcctcccaaagtgctgggattacaggtgtgagccactgtgcccagcccaaactgtacacttttaaatggtgagttgtatgatatgggaattaaatcatgattttaaaattgccaacaaacagtggcacctataaaataagacaaccacaccatgtccgtgggaaggctgttggagggttaaacaatgtgctggtgtggtcaaggcttctgtggtgcctggcacagagtgagggctcaaacacagcagctataccataataaatcacgtcaacactcgtattggctttctgcctaaaacacaaggaggggtgtgacactggaagagagggtagctgggcaacagtgccaccgcagccctcggccagggtctgccacctcccttctctctagcggagagctgtctccatggcaaccacatcagctcaggccaggggctcctgttcccagccgggtgacagcaccacctcggcagcctgtcaggatggcaacggcagatcttgatgatgggactgaggctctggcagaagaattgctcagggaccctcgtctccatagaaaccatgtcaggaaagagacggaggagggagaggataaacagcaaataataaacacaggctcccgcctcctgtgcacaagcctgagacaccacagggcacgcgaggagagctagaccagcctcactgacaccagctgcaaaaggatgtgaaccagtgtttcttgagcacctactctgtaccaggcaccacaaagggctctttacaagctttacctcttttaaaaatttcacaaataaattccaaatactttcttttcttttttttttttctttgagacggagtcccgttctgtcgcccaggctggagtgcagtggcacaatctcagctcactgcaagcttcacctccggggttcatgccattctcctgcctcagcctcctgagtagctgggactacaggtgcccgccatcactcctggctaatttttttttgtatttttagtagagacggggtttcaccgtgttagccaggatggtcttgatctcctgacctcatgatccgcctgccttggcttcccaaagtgctggtcttttcttttctgtttcccccctccccctccccctccccctctccctccccctccccctctccctccccctcccccctccccctcccccctccctctccttctccctctccctctcgatgcagggtctcactctatagcccaggctagagtccagtggcaccatcatagctcactgcagcctcaacctcttgggctcaagtgatcctcccacctcaacctccctagtagctgggactacaggcatgcacaaagatgcctggctaaatttcgtattttttgtagagacggggttttgccatgttgctcaggctggtcttgaactcctagccccaaccaatctgcccacctctgcctcccagaatgctggggttacaagcatgagccaccacacccagcctcattccttcttaaggttgaatagttttccattatacatgtgtactacactttgtttatccattcctctgttgatgaacatttgggttgcttctaccctctggctattgtgagttatgctgctatgaacacgggtgtgtaaatatctctttgagtctctgctttcaattcttttgggatatacctagaagtgagattgctggatcatatgattgttctatgtttaatttttgaggaactgccatactatcttattctttttaatttcttcatagtattctatggctacataatcttattaatgatcctaaacaacctcataggctgcgtacagttatcatcctgctttatttatttatttatttatttatttatttatttatttgagatggagtttcacttttgtcgcccaggctggaatgaatgcagtggcgcaatctcggctcactgcaacctccacctcccaggttcaagagatgctcctgcctcagcctcccaagtacctgggattacaggtgcccgccaccacacccagctaatttttttttgtatttttagtagacatggggtttcgccatgttggccaggctggtcttgaactcctaacctcaggtgatccacccacctcagcctcccaaagtgctgggattacaggcgtgagccactgtgcctggacccccctttttttttttttttttttttttggagatagggtctcactctgtctcccaggctggagtgcagtggtgcgatctcacctcactgcagcctccacttcctaagtagctgggactacaggcaggcaccaccacacctggataatttttgcattctttatagagacagagtttcactatgttgcccaggctggtctcgaactcctaggctcaagagatctgcccaccttggcctcccaaagtgctgggattataggtgtgagccaccgtgcaggctttgcttgtttgtttgcttgcttatcctgatgtcacagataaagaaactgagacttagagaggggaagtggcttcagggttccagccacatctctgctaaggagaggctgggtgaactcaggcaagctgttcctcctgagcctcagtttcattacttgtaccgtgaccttaagatgctttcagaaattgtctccccttttcactatcaagggttgcagcagcaagacggtgtgaagatggtgctccgtgttatgggccaggccatgggggtgggcagctgaatgaagggagggggctagccacccttagcagcaaacgcctcctctccctgcacactgagagggcattggcacatcacaccaacacacccagtgggaaggatggctggaggaatgttctggccttgggctgtggtgtctcagtccaaggacactggcaggctcgccctcgggggaggaaggcaggcagcgcctgcagcgaggagtgtgccctagaagaatgcacgatcctcatatctcatcagcaggcagagagctaaggcctggctctgcctctagggccagaagccaccccaggccatttggaacacagaaccctggaatggggggattccagcctttaagggacacctaggctgatggtttctagccggcattctgcagaaccccctgagccctgcatggccttgaggttgtccctccctctctctcaggggctgtttgctcatccacaaaatgggcatgatcgcaaccttgttagcatgaaaatgtttgagataaactgtcaagcagggcgcataacacactgtatacccaacacacaacaggaggagaaggtctgccaggggaggaactggcatgaacaaacacagacaggaatgtgtctcagggtcacattcgggaagcaccagtaccccagagacactggcctgagacccagcccctgcactgacttcacaccaaatggcaggatctcgcagtctcttgcagccactccacatgcgttattcctgttggtcctcacaatgactcagggcaccactgccccattgtataggtaaggaaactgaggcacagagggctgagccccatgcctgacattgttgcatgttttctcagttaatcctcccacagcggctgtggttctttgatgaatgactctctctctcattaccccgtgagctccctgaggacaggaactgggtgtgttttgttcaccattgtaaccttagtgtccagcacacaatttacacagtaggtgctcaggaaatgcatgttggaggaatgaatgaataaacaaccttgccagggaggcataagctgcccatttcccacaagcgggggctcacagagacactggcttgggggggcttgcatgtgcccacctgccctaggctggccctgctggatgcatgaggtcctcacctctctcggtcgctccagctccgtctgcagcacctgcttagccagctcagtctcgatgagccgctgacgaagctcttcgttctcctcctccagccgcgcccgtttcttctccaccacctcgagctccttatgcagccgcatggagatgtccttagagacctgtgcaggggtgggagagagaaggatgtgagcaggctgaggagagcccccactgcaagtcccactgaccacccgactttcacagcagggcaaccctagagacaggcaggttcctatcgcatcactgccacgctgcagatgagcaaactgaggcacaaagagaccaagaaactcatgaaggaagcagtagaaccaaaacccaaacctaggtaccgcaagctctcagcatctgtatcacagcacagccccagaaagctgggaagaccctgttctcaggaatgccttttcatttacctgaggcttttttttttttttttttttttgagacagggtctcactatgtctcccaggctggagtgcagtggtgcaatcatgtctcactgcaggcttgaactccagggctcaagcaatcctctcacctcagcctcctgagtagctgggactacaggtatgcataaccacaactggctaatttttgcatttttatgtagacacggggtctcagccgggcgcagtggctcacacctgtaatcccagcactttgggaggtcgagacaggtggatcacctcaggtcaagagttcgagaccagactggccaacatggtgaaaccccatctctactaaaaatacaaaaaattagccaggcgtggtggcaggtgcctgtaatcccagcactttgggaggctgaagcaggagaattgcttgaaccagggaggcagaggctgcggtgagccaaaatcatgccactgcactccagcctgggcaataagagcaaaactttgtctataaataaataaataaaaagaaacggggtctcactatgtggtccaggagagtcttgaacttgtggcctcaagggatcctcctgcctcagcttcccgagtagctgagattacaggcatgagccactgtgcctgcctacctgggctcttcacacttccaaagcctctcccagccaccacttgcccagtcctcacaaaagcctgtgggagggccagaagctcatcttaaagggaggagactgaggaactgggtacagtagctcacacctgtaatcccaacactttgaggggctggacacggtagctcacacctggaatcccacactttgagaggccgaggcagggggatcgcttgagcccaggaattcgagatgtgcctggggaacatagcaagaccccacctctacaaaaaacccaaaaaagttagcttggcatggtggcacacacctacaggcccaactactcaggaggccaacatggaagaatcacctgggccctggagttcgaggttgcagtgagctatgattgtgccactgcactccagcctaggcaacagagcgagaccctgtctcctaaaaacaaaacaaagcaaagcaaaacaaaacagagaggggattgagctgcagtggaaacccagagaagatgggccctagaccactgaatcccatctctgccagtgaccagcatgtagtcctgggcaaggcaattttcctctctgtacctcagtctcctcaactataaaatgaacgcagtgataacagggtcaaccttacaggcccgacaggataactgaaccagctattacacaaaagccttggcctggggcctgcacacagtgagttctgggtgactggtagctgctgctccaaggaactgaagcccagagaagggcatgatcgctggaggtcacagtgtgaccctgagacctatatctagttgtctgggatgtagaacaggcccaaaatgacaaagggtgggcagatgtccaagtcatccctacagaaagaagctagaggagctgcaatctctgatcctggtccaggactctgtagcaacagcaccccattcctggtagacaccctctgttctgtcccctgctggctggttgagggaagccaggaaaggaggcctgcagggatgaggaaggaaggcccttctgggctgggaaattgcaaccagactccatctctatgtacattgggaactactgtttggtgaatacctactgcatgccaaactcacccatcttcaccccaatcctgtccccattttacaaggaaactggagctcagagcagaagtgactcactcagggtcacgcaaagccagtgtgggttgagctgggctgggagccccaggggtttggctgaggggccagtatagcccagggtttcccaggggtgcccaggtttcgccagcaggaactccatgtggggcagagagcccagcaacccatgcctgctggtctcggaaatgactgttgtgcctcctccttgccagaagggaagagggccctccctggctctgacctctgcctgggccgaagcccagctcggcacggaccccttggcaatgtatgaggcaggccaggaaaaacaacgaccagaaaggaaaccaggcatggcctctccctccctgcactgccactgcctgtttctgcccgaggatctcgtaggacagccaggagcgggcccatgaggctcctcccacagcctctctgggtaccagaccttcctcatccacgaagtggggagaacaacccctcagtatcagaacaagggctttgcagataggaaaactagattcaagcccagttccagcatttactggctatgtgacccaggttaagttatttaaacatggtccccagtttggggctgttaggtcacccagtaagcccctgtcctgatcaacattccattcattaactcactcatactcactcactaactcactcactcactcatcctgcttaggcactggaggcaggagtggtggggtacagagatcaaggccgcagacatacttggcctcattcatatctatgtgtcccagcagcagcgcagcgtcaggcacacactaagtgcctaataaatgcttgttggatgaacaaataaatccaagggtccaacaagtgaaaagggagggagatgaatgagtgaatgactgaatatacatggggagtggtacctgccctcgcagggctgaagaggctgccctcaaatgccaaccccacccactatccaggaagggctgcacccctggctggggtgagggctcctctctcaaatgagctcccatctgggccagctcctctccacctgcggggatgccccatctccaccatgtcctccacctggggaggctaccagtccccatcaagaagtcacaatccatgtggatttctggatcctctggggttcatgaacaactctatggatttcatcccctcccatcctctccatgattccccagttcccttctgccccattctccatggaatccctttcctatttactccctttccctgatggctgctgtatcaaaagaaagcacaggccaggcacgatgactcacgcctataatcccaacactttgggaggctgagacgggcagatcacttgaggtcaggagttcaggaccagcctggccaacatggtaaaaccccgtctttgctgtctctactaaaaatacaaaaattagccaggcgtggtggcacatgcctataatcccagcttcttgagaagctgaggcaggagaattgcttgaacccaggagacggaggttgcagtgagctgagattgcaccactgcactccagcctgggtgacagagcaatactttgtctcagaaaaagaaaaaaaaaaatcacaactccaggcagccagactgggaggcaggagccctgtggcctgggcttgtccctgctcctcagtgagcctcagtggtcctgggccccctcggccctcacaagtgatttacagaatcagctggaacatcccccgggtgctcaccacgtgcttttcatcccgttgggaagcactttgattattatccccattctgaggctcagaaaggaaaggtcacttcccaaggtcacacagctaggaaggctatagaactaaggtttgaaatcgagtgggtcaactctaaagtctcactctcaggctgattttgccgtataggcccaatgcgtgaaaacacattacattaacatcaacaatacaagtattaataataaaccccaacagtgggcttactgtgtcaggcatttgaagggccccacgtgtctatcccatttgatcctcccagctaccctcaaggtaggggggctgagatactaagggaggcgcggcagctgcggcttccgaaaaccagggcaaatccctaaaccataaacaaatgcactcagccatgaggtcactgtttacagcgctagggcctggctcctgccaagtgcaactagcagcctccagcccctgctccccaggcatcaggcccctcggctcctgggcctctgtcatcctgatcctcagggagagggatgggagctctcacgaaagagcagctcctggccgggcatggtggctgacgcctgtaattccaatactttgggaggtcgaggtaggaagactgcttgaggccaggagttcaagaccagcctgagcaaaatagggagacccccatctctataaaaactttttaaaattagcagggcatgatggtgtgtgcctgcagtatcagctactcaggaagctgagacaggaggatcccttgagagcccaggaggtcaaggctgcagtgagctgtgatcagccaccgtactgcagcctgggtgacaaagagagactatgtttcaagaaagaaagaaagaaacaaagaaacaaggccgggcatggtggctcatgcctgtaattctggccctttgggaggccgaggccggcagatcacttgaggtcaggagttcgagaccagaccggtcaacacggtgaaaccccgtctctactaaaaaaatacaaaaattagctgggtatggtggcatgcctgtaatcccagctactcggaaggctgaggcaggagaattgcttgaacccgggaggtggaagttgcagtgagcagcgatcacgctactgtactccagcctgggtgacagagcaagacttcatctcaaaaaaaaaaaaaaaaagaaaaaaggaagagcatcccctggccaggcagcattctggactccgtgtggctgaatcctcctacaaaccccaggagggtaggaatgtcacccccactctacagatgaggaaagtgaggctcaaagaagggaggtaacctgcacaggtcacctaggaatgaaacccaaagccagaacattttctccagcaacatctgtatctgaggaagggggcgtgctcctggtgtgtccttggcttcccacaggagtcactttagaccagagtttagatcccagattccctggacctgacctccttgtatccggtctcagctcctcacgggtcctgggaatgtatgttgtgaacaagccctcctggtgatttttatccaccctgggaggctgagatcctggcctaccctcgcccccagactactagtctactactactaccaaccagtcctactagcctactactactagtagtcctactgatgtattgctcagaagaacttatacttgctgtgtgagttcttctcagcaataagaaaaccacaaccagaccaggcatggtggctcacacctgtaatcccagcactttgggaggccgacgtgggtagatcacctgaggtcaggagttagagaccagcctggccaacacagagaaaccccatctctactaaaaatacgaaaattagctggacatggtggcgcatgcctgtaatcccagctacttgggaggctgaggtaggagaattgctggaacccaggaggcagaggttgctgagatcacaccactgcactccagcctgggtgacagagtgagaccctgccttaaaaaaaaaaagaaaaagaaaaccacaaccaatacatgtttatttccagacctagtatttaatactctcttcacttgaattatttcattttatcctcacaaaaacctctagagggagggactcattttatctccattttccatgaggaaacaagctcagagatgtgaaggaacttacccaaggccacacagcaaacgtggcacagcagctctccgccccgtgaccttgccctcctcatgctgggcaaaggccccaccgaggttctgtaggtcctgtcaacggtgaggaccagcagagagggagagctgggggttgggggggggcactgaggcctgtggttttattcatgaccccccaccccaccccaccaatacccctctgctccataaaaccacaggagctcaaaagccctgaggattcagctggtcaaaagccacatttaacagaaggggaaaatgaggcaccaagcggtaggggcaagtcagggcatggaccacggagctggcagagcaagttggggaagtcccagaggtaccctcctaggcagcgcccgccccctccccactcgggtccatcaagccctccaagacgatgccagggaaagcagcattctgataacttcccaaaaccccccagaacgaccccagcacatggggctcagggtggtggccagaggtgtccatccagctcaggccccaggcccgcagatgagctcagcgctccagctgcagcgtggggagaggagggagggaagggcaagagggatgctgattggctaattcaaaccccaacagaaacggcccctcctctccgcccagactccggagagccacacacccgctccccacacccgcctccccgccgccgccgccgctgctctagctccacccacggaggcgccgcagccggcagctagctccaggtcccagcctctcctccgcctcttcctcatctttctgaagtctgacatttttttgtgtccctcccagaaatcctccactatatgcccaaacgcagattcctctgagcttctccagctattccctccccctccccatctcctccctactgccttcccccaccaccccccacccctcccaacccagtgattggaatctgaatatgcccgggagctgccctgtcaagtagaggtacgctttgaacttggaaactaactcattcttttttttcttttagagagagaccttgtcgctctgtcgcccaggctggagtgcagtgctgcaatcatagctcactgaaacctttaactcctggactcaagcaatcctctggccttggcctcccatatagctgggactataggcacttgccaccacgcccagctaattttttttttttttttttttttttttgagacagagtttcactctgtcacccaggctggactgcaatggtgtgagctcactgcaacctcggcctcccaggttcaagcgattcatctgcctcagcctcctgagtagctgggagtacaggcgtgtaccaccacacccggctcattttgtatttttagtagagccggggtttcaccatgttggccaggctggtctcgaactcctgacctcaggtgatccatccgcctcggcctgccaaagtgctaggattacaggtgtgagccaccacccccagcctctgctaattttttttatttttttgtagagatagggtcttgctatgttgcccagcctgatttccaactattggcctctagcgatcctcccacttcagcctcccaaagcgctgggattctgggattacaggcatgagcctccacctctggcggagacacaaccattggttgcctcatgtgtaggacagcactacaatcccattgtgcaccaacaagaccacagggggcgccagcagcttcctggaacaggcactcctgtttacctcccctggttctgctggcctttgaaaccatggctctccctggtcccttaacaaaggtttttcttttatattccactggaaaggctatagggcttgagtttgccagtgtcttccaacagaagggacttctccccaggtaagtgtgtggctgactcgcatcctgccgctcccctgggtcctcacaggagccatcttctgccaccttcctctttcccccttcctggctcaggcccacttctcccttgggccttcactcagaagtcacccctgcaggaagcctccctagggccccatcccagctcctcgtgtcaccagatcacactgggctgagttctgagggcagagggccgggcctgggggccctggagttctcaccaccagaccagagcttccgaagacaggcagggggacatcccacctgccaacctcccacccacccttcccctgcttcctgaagcagagagcagtgaggccaagctggaggcttgggaggctcatgagcctgggctctgccaccaacacactgagcgccccttgaccttcggcaggtattgcttttctctgaacctcagattcttcatcaagaaaatggaaataatgatagctaacatttttgagtccttatgctggcattttacccacattattattattattattattattattattattattattattatttttgagacggagtctcactctgtcaccctggctggagtgcagtggcgcgatctcagctcactgcaacctccgcctcccgggttcaagcgattctcctgtctcagcccctgagtagctgggattacaggcgggaaccaccacactcggctaatttgtgtatttttagtagagatggggtttcaccatgttggccaggctggtctcgaactcctgacctcaggtgatctgcccgcctcggcctcccaaagtgctgggattacaggcatgagccactgtgcccagcccgcattatttcatttaatcctcatataaccctgtgagatagagattgctgcaaacccattttacagatgaggacactgaaattgatgactttgctcaaaataataaagttcaggtatattggagccaagatttaaaccagccttgaccaactctaggccttcactacttctctttgtttttttttttttgagacggagtctcgctctgtcgcccaggctggagtgcagtggtgacacgatcttggctcactgcaagctccgcctcgtgggttcacgccattctcctgcctcagcctcccgagtagctgggactacacatgcctgccaccacacctggctaattttttgtgttttcagtagagacagggtttcactgtattagccaggatggtctcgaggccttcactacttttcattagcataattaaggaacctctgcctgacaccgtggctcatccttgtaatcccagcactttgggaggccaaggcaggaggatcacttgagcccagaagtttgagaccagcctgggcaacataatgagaccccatctctacaacatatagaaaaattagccaggtgtggtggtgtgtgcctgtagtcccagctactcaggaagctgaggtgggggtagcccaggaggtggaggctacagtgagctatgatcacatcactgcctgatacctaggcaacagagcaagaccttgtctctaaaaaaacaagaagaaaaagaaacccccatggaactgtgcggggacaattagaggctagcaccaggtggtggttgatactcaataaacagtagcttctcagccaggcgcagtggctcatgcctgtaaccccagcactttgggaggccaaggtgggcagatcacctgaggtcaggagttcgaaaccaggctggccaacatggtgaaaccctgtctctactaaaaatacaaaaattagccgggtgtggtggcaggtgcctgtaatcccagctacttgggaggctgaggcaagagaaatcgcttgatcccgggaggcagaagttgcagtgagctgagatcgcgccattgcattccagcctgggcaacaagagagaaactctgtctcaaaggaaaaaaaaaaaacagtagctgctgctagtaggaaggattcatattatgatatcattttgggatacccttgatagaagccctgtgggttcaccaggaattcctacttagatgaggaaactgaggcccagagaggtggtagaacttggccatggacacacggaaatgagatgcaaggccaacctgggccccacttagacttgtggtcccatcccagcaacaagggcacccgagcccaggctgaccttgacatcctgctccagaccacggataagctcgccgtccacctggccggtctgggcggcacggagactgcggcgctcggctttgcgcagccggtactgcaggatgcggcaggtcttgctggcctggtccagctgctgtcgcagctcctgcagctgatacacgtcctcctccatatagacgtcccgcatctccagcatctcggcccgcagctcctcaatctcgtcctgcggagggaaggaagagtcaggtcactgggcccacagtagcagctaggaggccggagtactggccacacctaggactgaatgaagcaccgtgggggacctggatgtggcaggctgaatgacagacctccaaagacgtccatgttcacattcccaggatctgtgaatgttgccttacatggcaaaagagactttgcaaatatgagtaaattaaggatcccaagacagggaaacagaagcagaggctggagtgagatgctttgatgttggaggaaggggctgtgatgacggaggaagggggtgcctctcaaggcaaggaaaaggtttctcccctggagccttcccgaggaatgcagccctgcccaaaccttgatttctagacctttgacctccaggatcagaagataataatctggtgttcatttttttgttgtttttgagacggagtctcactctgttgcccaggctggagtgtagtggcacaatctcagctcactgcaacctcctcctccctacttcaagcgattctccctgccttagcctcccaagtagttgggattacaggtgcccaccaccacacccagctgattttttatatttttagtggagacggggtttcaccatgttggccaggttggtcttgaactcctgacctcaagcgatctgcccgccttggcctcccaaagtgctgggaacaggtatgagccaccctgcccagcctggtgttttttttttttttttgagacggagtctcgctctgtcgcccaggctggagtgcagtggcgctatctcggctcactgcaaactccccctcctgggttcacgccattctcccgcctcagcctcctgagtagctgggactacaggcacccgccaccacgcctggctaattttttttttttatttttagtagagacggggtttcaccgtgttagccaggatggtctccatctcctgacctcgtaatcagcctgcctcggcctcccaaattgctgggattacaggcatgagccaccgtgcccttggcctggtgttcttttaagccactaaatttgtagtgatttgttacagaagcaacaggaacacactggggaagcaggagaggccatttaagaaacatggatgaggttgggcacggtggctcatgcctgtaatcccagaactttgggaggctgagatgggcggatcacgaggttggatcaagaccatcctggctaacatggtgaaaatccgtctctattaaaaatacaaaaaattagctgggcatggtggcgggtgcctgtagtcccagctactcgggaggctgaggcaggagaatggcgtgaacccaggaggcggagcttgcagtgagccgagatcgcaccactgcaccccagcctgggcgacagagcgagactccgtctcaaaaaaaaagaaacatggatgagcatcaactatgtacgtcctaggtaggccctgtgctaagcgcaggggcagggagggacaatggggtgggtccagccccttctatatactctgtatggagccccaagcttcaccaggaagatacacagtaaaccagaaaataataataacaaaagacacctggctgggcgcagtggctcgcacctctaatcccggcactttgggaggccgaggtgggtggatcatttgaggtcaggagtttgagaccagcctggccaacatggtgaaaccctgtctctactaaaaatacaaaaaaaaaaaaaaaaaaaaaaaaaaaatgagcccagcgtggtggttcacgcctgtaatcccagctactcgggaggccgaggcatgagaatcacttgaacctaggaggcagaggatgcagtgagccgagattgcaccattgggtgacagagtgagaccctatctccaagaaaaaaaaacaaaaacaaacctcagatactgttaagtgctataaagacaaagccaaaatgaaaccaaacaacatgagttatatgatagggtgagggggggtgctatgttaggggacatgatcagggaggccatctctacaaaagagacatttgagctgagacaagaaggaacagccgagaaagctagggggagaggttattccaggcagagggaacagtgtgtgccaaggctcagaggcaggaaagagctcagtgtgtcaaggtacagcaaggaggccagggcagctactgggttaatttgaggctgaggaaactgacaggagtcaaccacatggtactgtgaagggccaaatagaatttgggtttgggatttgtttgcttgcttttgttttgagatggggtctcactctgtcacccaggctggagtgcggtggcaaaatctcagctcgctgcaacctctgcctcccaggctcaagccaccctcccaccttagcctcccaagtagttgggaccaaagacacacaaccccacatcgggggtggggggtggggtgtgtgtgtgtgtgtgtgtgtgtgtgtgtgtgtgtgtgtgtgtatacagggttttgccatgttgcccaggttgctcatgaactgagctcaagcaatctgcctagctcagcatcccaaagtgctgggattacaggcataagccaccatgcctggcctgggtttgggttttaagcagagagggtaagagtatgacctcacttcctgaaggcagcttctgctaccgctgtcatcagcttccagctgttcctcacttctcctttgtaatcattattagcaaatttgcaattctatgtttaatagtttgtctcccagccaaaccatgagtgcctggaggcaaccccatttggcctagcaggtggtagcctcccaacaaatattaactgaatggatgcatgcatgtttagtcaggtcaaaaacaacaaaaaagacatacgaatgtgcaacaatcattagatactaagtgtaagggggagggaagtagaattacgcagaagaaatgcataattattatgtctcatacaaatgtgaaaacctagtcacaaatgggaatgataatacctactcttaatgtgaccgaatgatttaaataagattgtatactaagaagggaaactggccaggtgcggtggctcacgcctgtaatcccagcgctttgggaggccaaggcggtcagatcgcctgaggccaggagttcaagaccagcctggccaacatggtgaaatcccgtctctactaaaaatacaaaaattagccaggcatggtggtgggcacctgtaatcccagctactcgggaggctgaagcaggagaatcatttgaacctgggaggcagaggttgcagtgacccaagatcataccactgcactccagcctgggcagcagagcgagcctctgtctcacaaaataaaaaaaaagagaaacagagtcaccagggatgaatgacctgctaaaggcatccctgaggagccaggggaagcaccgaggatggcagtgatggaagcaggggtggggggtccaaggggcaagaaggcctctgtgggccctggagagggcagatctggagagccggattcctcagctctccctacccgtctttccccaaagaaaacggaaaggaagggactgggaagtggggtctcgtattcctccctcctcatgctgccactgggaggagggagtgtccactctgctcccgtcagagggacacctctggcttctgtccgagcacccctcaccacaccctcgctggggctgggaggaagggggatctgattttgtgcctgtgaaaggaacaaacatggggttctctctcttcactcctgcctgcccagatggggaggactgctctgctcttccaatggtcagcctggtaggatggctccctgtgaggaagggggtacgactggggttgccagcgccccctgaggctggatggatttaactcagagtcagggttagggagccctgccctccaggccagttctcacaagctcgagaggttttcctgcccatcggtttgactcctggggctgcagagaacagtcactttgccagccccccacccccacctccaccctcatagactcaccaccccaccagcataccacgtggacagaaccagagtggagaggaggaagtggaacagtaaatgatcacaccagttaaaaaaatgaggaagtgaaggatccacgcgctgtttcaggcagccggtgaaggaagcatgaaggaaagatcactcaggaagtgcaagccggtaggctaggccagcctccagatggatctgtgttcaaatcctagccatgccggttaccagcacctcacttattatctctagaaagttaaaatgacaggatatggtgatggaaagaataggagggtctaagtggaccccaagctcaggttgaaccaaggggaaatgcacacaaccctatgatgctgggctacattaacaaatgcatgacatttagatcatgggaggtaacatctcttacacaagatcacacccagagcactagagtcatttttggaaatcattttttttaacttttaaatgactgattttcttatttataaaacaggccaggtcgggcacgatggctcacgcctgtaatcccagcactttgggaggccaaggccggcagatcacgatgtcaggagtttgagaccagcctggccaacatggtgaaaccccatctctactaaaaatataagaattagccgggcgtggtggtgcacgcctgtaatcccagctattcaggaggctgaggcaggagaattgcttgaacccaggaggcggaggttgcagtgagctgagatcatgccactgcactccagcctgggtaacagagcgagactctgtctcagaaaaaaataaaataaaataaaataaaataaagcactggcagggcacagtggctcacccctgtaaccccagcactctgagaggctgaggcaggaggatcacttgagcccaggagttgaagaccagcctgggcaacacagtaagacctcatctctacaaaaaaaaaataataataataataataataacaacaataataataatgtattacatccaaataggccgtgactttaaaaatggctatcattggccaggtgcggtggctcatgcctgtaatcccagcactttgggaggctgaggtggatggattacctggtctggtagtgcacctgtggccccagctacttgggaggctggggtgggaggattgtttgagcccaggaggttggggttctgttgaactatgattgcaccactgcactccagcctgggtaacagagcaagaacctgtctctaaaagtaaaacatgatcatagagacagttttgaaaatagagaaaacaggccaggtgcagtggctcacgcctgtaatcccagcactatggggagaccgaggcgggcggaccatttgaggtcaggagttcgagaccagcctgggcaacttggtgaaaccctgtctttactaaaaatataaaattagccaggcatggtggcaggtgcctgtaataccagctactaaggcaggagaattgcttgaacccaggagatggacattgcagtgagctgagatcacaccactgcactccaccctgggtgacagagcaagattctgtctcaaaaaaaaaaaaaaaagaagaagaagaagaagaaaagaaaaagaaaacataatccatgcataattacaatacctgaattacagtggctctcaaagtgcagttcctggaccagtaacatcagcatcactggtgaatttgtgagaaattctcatgtcccaacccagacttgctgaatcagaaactcctagggtgagccccccaagggattctgatgaagggcgtttccttctagttatttccccccctaaaagggcaagagtcaggtctctgagcacaagtccccatgccagggcctgacacagagcaggatctcagcaagcatcctttgaataagtgaatgaatgaatgatagttctcacatgagcagctgtctccccaaggcctgcccttcaccacagtcaatttgtgacagcccaagatgttgcattcacgccagttccatctctccaggggggcctaggcctctcagggggctagtcccagctgcaggcagaatgcccgttagcccctgctggcacggccccacgtgagagggtgagctgacaaaggcaggcttgtggccccaggctgggtctgcagggacgtgggcgggagaggctggcgaatgcaggacttaggcaggggcgctgggctttccgggcccgaggtggggctaggagaggtgctgctggggcttggggaggggacccagagggcaggcctttgttctgttccagaggttcacagtcctcagggagcctaagaatgttctggggctctgtggtcatgcagtctgggcctccatcccaggagagctctccagtgacagatccaactgaaggagctgggggtggggggccctgggaggtgggggtgaggagcacaggcttcccagctccttcacagacagctcagtggttctgaagagcctctcccagctcccagaccccctaactgtgtggaagtggggagggagaggcccagctccactggactcagtaggcctcgtggctatggaacaaagttgtagacatggtgaaaccttgtctctactaaaaatataaaaattagccagctgtggtggctcacgactgtaatcccagctgtttgggaggctgaggcaagagaattgcttgaatttgggaggcagaggttgtagtgagccaagatcgcaccactgcactccggcctgggcaacagagcgagactgtgtctcaaaaaaaaaaaaaaaatcccctcaacaccactggggaaaccccaagcctcatcctctgccagacaacaaaagggcacagtgcctggtagtgcccacctcagagccttggggcccctgaccctcagccccaccacggcctggccacctccttcaagttgacctcttcaccttaaaggctactcttgaagctaacccagattttttagctggactagaaacggggaataggagcatgggggaggatgggggaccagggcacccacactgctgccaggataggcagtgcttccctttctagagaatgcttttttgctctgattacagttaatagctgtttttggagaaaatctgaagaaggtagacggctttctatctcttccaccggttctcaccagcttctgcagtaggtccaagtccccttaccgggtcctgagccagcccctggtctcctccctactcccgccttaccccagccctccagcgtccaaataggctgtgactttagaaatggctaccattggccaggcacggcggctcacgcctgtaatcccagcactttgggaggccgaggcggatggattacctgaggtcaggagtttgagacttgcctgaccaacatggtgaaaccccatctctacaaaaaaatacaaaaaaattagccaggcttggtggcgtgtgcctgtaatcccagctactcgggaggctgaggcaggagaatcgcttgaaacccagaggcagaggttgcagtgagctgagattgcaacaatgcactccagcctgggcgacagagacagactgtttcaacaaacaaaacacggctaccacctattaggaggctcactaattaccaggcccccgcacaggcagtacgtgcattatcagttgacagtttaatcctcttaccgaccctgtgaggtaggtgctgaaaacgttcctgttttgcagatgaggagacgaggctcagaagcttcgcagagctgcttgagcaagggacctgcggggctggattccaaacaagccacgtggccctgggtcagtgcgtcataactgtgctcttccaatttgttcagctattccctctgctagaacggcctttgccaggctgactcctgactatctcatccttccagaacatttccttcccagactctgattcaaaccccacactctgaaatctatggtccgttgtgctggtaattttaggttgtatttgtctgttttcatgtcaatcttccccaagagctagggagaagggcaggggctggtttgtgtctagtcctcagcatcacccagggcagaccgtggcacagagcaggtacctgtcactgtctatgggtagatgtaggaattaaagaatgagtatggggccaggcgcggtggctcacgcctgtaatcgcaacactttgcagaggccaaagagggaagatcccttgagctcaggagtttgagaccagcctggacaacatagcgagaccccatctctacaaaaaaattaaaaattagccaggcatggtgctgtacacctgtagcctcagatactcaggaggctgcaacaggaggatcacttgagcttgggaggttgaggctgcaataagcaaggattgcaccactacactccagcctgagtgacacagagacagtctgactcaaaaaaaaaaaaaaaaaaaagagtatagcttctgtcctgcccagtccacaactcccagccagctgcaaagagttaggaagacaggagttcaagaccagccttggcaacacagtgagtctccgtctctacaaaaaaataaaaaattttaaaaacttagctgggcatgtgcctgtagtccccagctactcaggaggctgaggcaggaggttcacttgagcccaggagttccaggctgctgtgagccatgagtgcaccactgcactccaggctaggtgacagagtgagacccctgtctctaaataaaaatgagagagggagagcctgggcagatcagaactggtcgcagatccctatgccacccaaggagggtaggcagggtctgtctacgtagggaacctcctgctcacccacccactccctgcccacaaggtgcatctctgtccaccccctgccaaaccatgagctcagcctgcaggaagcagcctctcaaaggcaaacctgctcccctcgatggactgattcccaagaatcctgggagaattgtccaggaagagcctcttggtcccggctgggccggacagccaaacatgagctcacactactgctaataatagcaagatcttgcacagcagcagagggcttcacagtttacaaagacattccatctgaatcatctcacagatcctcactgaaccccccactcccagtaaggaaagacaggaaccatcatccatgttctacagatgaagaacttcagagaagcacagggaaggtgggtggtgcccaagcacacgcaaacaggcagggggagggggtgagacctccaagcaggactcaaagtccaaccaccaacttcaagatctttccttggaaccagaactcagggagtccatgaacttggaaaatcacatcttccttttcactgacctctaagtaaaatgtagcatttccttctattctgggcctatgaacaaatcatcattatatgagtaatatctgtgactttgccaccaaaaaaaaatcacaggtattttcatatcatataacagttgctgcaaaaatgtcaaaatattatttacactcatcagtagtttgaaattatgctagttagatctgtcaccagaatttatgagttaataagcacacatattactatgttgtaatttaaaaatactttaataactgtgtttcaatatagttggtttccttttttttttttttttttgtgacggagtttcactcttgttacccaggctggagtgcaatggtgcaatctcagctcactgcaacctctgcctctggggttcaaacgattctcccacctcagcctcccgagtagctgggattacaggcatgcagcaccacgcttggctaatttttgtatttttagtagagacggggtttcgcctcgttagacagtctggtcttgaactcctgacaggtaatccacccgcctcggcctcccaaagtgctgggattacaggtgtgagccaccgcacccagccaaaataagatataactttaaatgttgaaatgaaatacaggcgggagaagcagagctccactttcaaatcacactttttacttattttattctttaagacagggtccctctgtgtcacccaggctggagcacagtggcttgatcacagctcactgtagccttgacctcttggactaaagtcatcctcccacttcagcctcctgagtagctgggactactggcacacaccaccatgcctggctgaatgttgtattttttgtagagagggggtcttgctttagtgatttaccagcctgggctggtaaatcacactttaagtgttctaagaaagattactttctatcagaaacccacgcagatataaaatgatttacgtttgtacactgaggacagcggggggaagtttagatttggggcccactggaacctttgcacgtggctccagatgcatggctatgacggaattggcctgcagcagctggtgagctgtggggctggagatgaaagtgaccaaacaccaggaccctctgcagaaacacaagtggcagcatgtggtctgaacccagcaacagctcccagctgggaggacacggagagaaccaaggggacatgaggctcccaaaggcaggagcaggttgcctcttgccagccaccaaggaagagacttccagagcggaagtccctcagctacctcccacccaagagtcagcccctagtgtccctggggaactctgatatgacccctacagaccatattctagcaactctacatatgccaaggctggctcaggggcggggagctggaatctgagcccacccactcccatgggactctgtactgcctgggactcctactccacacctgtttcccacctcaaaagccacctccagcagagcgcagtggctcacacctgtaatcccagcactttgggaggccgagacggacggattacttgaggtcaggacttcaagaccagcctggtcaacatggcgaaaccgtctctataaaaatacaaaaaattagccgggcgtggtggtgcacgcctgtaatcccagctgctcaggaggctaaggcggagaattgcttgaacccaggaggtggaggttgcagtgagccaagatggcaccactatactccagccgggatgacagaatgagactgtgtttgaccaaaaaaaaaagaaaaaaaaaagccacctccaccaaaagcctccctgactgtcccagggcacagcccttttgtttgaacaattagtgagtgcctatggtgggccagatccatcaccaaattattggatttaatccttatgatggtcactctgctcccaactaatttgttctccattcagtacagtgagtgattttttctaaaaccatgtttaaaatgtggttaaaactgtttaaaattttctcctgtttaaaattctccaatgatcaccaaaacctgggaatcacccaaatgtccctcagctggtgaatgataaactgtggtacgtccacgcaatagaatactactcagcgatgaaaaggaaagaactgctgacacctgcaacatggaggaagctcacatgcaggaagcttagggaaggaagccagactgagtaggctacacactgtatgagtctgtttttgacactctggaaacggcaaggctctagggacagaaaacagtcccggtggttgtcagggtctgaaatcgagagaggaactgacctcacagggtgaaatttggggtgtgaaggaactgttctatatcttggttgtggtggtggctacagaactggatgcatttgccaaaattcattttattgtatgtatttgtataatatattgtacagtatattgtatatatttgtacaatatattatacagtatattgtatatagttgtacagtatattgtacagtatattgtatatatatacccagtacacctgacctaaaaccccaaaaagcaaaaagcaaagcaaaacaaaacctccagtgacttttcatcacatacaaaagaaaacccaaatcccatcgtacagcatacaggccctgcctggcctaagccccgtccacttctccatcttcatctccctcgacgcctcctctcactggcaacacagcagccacttgggtcgtaggcaaccagcagccacctcacctgtcccacctcaaagcctttggccttgcagtttcctctgcctggatttccctgccccccatctctgccctgctggcttgccttctgcctcaagtctccactgaaatgccacctcctctgagaagccttccatgctcctccaggcccattacgtccatcttaatcccttgtttctttcttggcatatatcataggcttatttgtgatactcagcgttttatttgtctgtttgcctgcagaatgtcagtctctaccaccaggatgtgatgtcaggaggacagagcccagcacagtgcctgggacacacagaacagctcaataaagaggtgctgaatgaatacacaggccctcagaggggaggagaatccccctgttctactcccctacagaaaactacttctagtcagcgctcctgtgtttgaatctaattccttgattctgtgaagctaatgcccatgggtgcttcagaccccagtggtggggctcaagtcccagcccagcaacacccaggccacagccctgccagattccaaaccttacccaaatgtaccacctcctccccaggttccaggggcccaacaagccctccgacgggcagaccaacccagaagaatgacagagctgagctgagaggcccagaaccttcactctgcgaggcagcaaccacactacagaggaacgggagcctccgcctggcccgcctgctcccatactgccctggccaccatggtccctccctcaggccgaggcctgggctgcctcccatctgccaccctggctctgggccactcgtctcctgcccgggcccgggccactcaccccagccccggaagggctgctctgtggagtgggccggcagtggccacaggggcggcatgccagccccacccaagaggccagggcagccatctgccgtcccttctgccggtcccccaggagtctgtcaaggctccagatgagatcatcacacttggaccccaaaaaaggatatgcaaaaaactccgcagagctccacttctcagcccaaatgcaaacactctgggcacagcagcaggggagggaaaccaaagactcaatcccttcatacccagggacagaaaggccttgagaaggacaggggacaatcccacagtccctggaggggatagcactgagtgggaggggggactctgggcacctgtctcccaccccagagctcaatctagcttagcatccttgcgaagaagctagggtccagttttcaggaagttgcatcaaaggtcctgatgaggccgggcatggtggctcacacctgtaatcccagcactttgggaggctgaggcgggtggatcacctgaggtcaggagttcgagaccagcctggccaacatgatgaaaccccgtctctactaaaaatacaaaaattagccaggcatgatggcacatgcctgtagtcccagctactcgggaggctgaggcaggagaatcacttgaacccaggagacggaggttgcagtgagccaagatcacgccactgcactccagcttgggcgacagagtgagacttcgtctccaaaaaaaaaaaaaaaaaggtcccggggaaagaaggccaggacacgcagcctggcatcaccgtgccacatgatgtccccactccagacaacacagaggctgcctggccctggagactcaccacgtcctgctcctctggttgggaataatgagggaagactggggcctggacccgcctctccaatgccaagaaatgagatgctccctgtgcacccctgatccccgccagggagtgcacattctctcactgcagcccgagcaatccccgatgggagaggaacctcacagaggtcaagtatgttgcccagggtcacacactaagtggcacagccaggattcaggtccagttggagctcctataagctggactagacagtcttataatgaacaatggtgacgataacaatagctaacattgacaagcgtttaatgcgttccagacaccggactgagacagaaaagccattatctcttgctcagtgatgatccttagaggcaggcactattattattttatccccatttcacagacaagcaaacggaggcccaggaagataaggtctacgcagccagtcaggagtgagcctcccagatccgtctggtacagttctgcacaagagacactacagatgctctatcagggaggggtgtgtgtgtgtgtgtgtgtgtgtgtgtgtgtgtgtgtgtggtggttgttgttggtaagagaccactgcccaccaaggccacatctggcttgtcactgttgtcactctcccattcaaggccttacctggcagagcagggagatatccacaggccctacggcctctggggcattcgtgtcaggaagcgcctgacagtttcctcccatcctttccatgtgaacaggaaggaaggcagcatctggacctggatgtgtttaaaacatcccccaaacaccctctgggttgcagcgaaatctcaaaaactcagagcaggggtctgaggtctttagggatagaaggcaaagctccaaagagagtggcccaaggccacaaagcctgaagctccaggacaccccagcacttcacacccctgccattccccctgcctggcatcctggagagaagcacaagaccccagtcttgcctcttgccacttacaggctgcatgacctctaacaagccccttaacctctctgggccttagtttctccctttgtaaaaggaaggagctaattaccctggaaggtccctgccctcatgcagggaaaggtggggcagtgatggcatgaaacctatcattaccccattaataatctaatcaacatcgtggtaaatgccccaaaggaagctccagggagctccaaggtgtctgacacaggagcctgacctggggagctgctgctggggctgagcgctcaaaggtggaggaagaaaccaagggaaggagccgggaactgcaagcacaaaggccggatgggaagagcaagagcacgggacagaggccggggtgtgtccagcacccgcagagcttgggcggggcaggggtgggtgaggctgtgggaggcaggaccacacaggctgctccaccatggggtagggtcaaggagaggcggggaggggagaggctggtgcaactgactcgagcccagaagacccaaagcaggcctgggccccaaccagagtaaagatgttcagctgatccagcctagctagggaaccccagaatttttttcatagaggctgagcttttccttgtggctcaggcagtgagagatgattcacctccatttgagaatgaggggccgccaaaggtgtccttccattagcaaatgtgtatcaccagttactaagctggaggcactagcctgggccattcagggaagagtgacacgacgccgtgggggagggaaggggggacacagacagggatatacgtttgggggtgcccaaaatgcagtgcagctctgtgcataacactcagactgatgccccaagccaacacccacagagggacacccagagccaagcacagcccctgtcatcaagcacccagcttaacctggggtcacgggggtcacaccagagccagatataacaggcaagcgccaagtgctgtcgggtccttcccaggagccagacctggctaatgggacccacacctgcacactttctcttacggaaccctcacggcaacgtgcggggcaaggacatccacatccccattctacagatgacgagaccgaggctcagaaagggaaagctcagaaaggaaaaggcagagctgggattccagcccagtcagcttggctccagatcacagtgctctctcccaaccaccctggacctcggagaacaaagggctggcctgctgcttccacctgctctgacccctgctgtgcctcactaccgcaaagcaggtagatgcagtgctgactgaggcctccagtgatgccagggtcagcctggcatggagcaccccagctccaagttccttccggcaccaaggggagtgaacgtgaccatggatgaggtcatgcatgtggggactaggggaatgacctcagtgaaaaccttggctgctgggcaggcccttgcttgaacttagctgcgcccctttcctaggggactctctctgccccggaggctatgcaagacacggggcctcctcccctcctctgtgccaggatggtgctaggtgcacagaacatctgagctgtcagcctcccaagtgccccactagaaaggatcacatccccattttacaggaggaagacggagtcttggtgaggggtttgcacagggacagcatgcacacggaggaggtgacacagtgaggtttggctccagacttgactccagaggtggagttggcccctagaccacacagcctggctctcctccctccccaggcctctccggcagggcaggcctcaggcccagggctgcagacacataaaaggaggtggctgcagctttgctgcaacaagaccactcccagcaaggtgctcccttggcttggcattcaatgcccttcccaagccagcccaacgccccttcccagactctccccatccctgccagctcccaccactccctccagcttttccgtttcaagcctgtggtccacctccaggccctgcctactgcctttcacttaattgtacacatatttattgagcccctacaacatggcaggcactgttctaagagctgggcacagagacagccacttgaggctaactccccagctccaaggacacctcctcctccaggaagtctgccaagtccctcctctgagctcccatagctcctctagccacctctacccttgcctccatcattccccagccagaatggggcaccctttatagatgggagtggcatggccctctgcagcccccagcaagggaacagggggagaagggggagatagggccagcaggaaattccaaggagattagaagggagttgcccccgggcagtgtttcttctgtgggcagctcgacaatcggtccacttcactcagccccactggccctgggcccaggagctgggcatcagggacctgggggacttcggtgtagcttcttctgacttcaagacctaccacccccatccacccaccacccaggaccccaagacccccagctccagaaggttacaaagtcaaggccctggccacactccttagtgttcccagcagccttgtagaagtaagtctagtgagccactgaaaacagtagtagtttgtacacattagctccagggagacacagaccaggatttcctgtttctgtgtgtggatgaaatgtcacagcgtgtgtgtgtgtgtgtgtgcgtgcgcgcacgtgtgtgcgtgtgtctaggttccctggtttgagagcctctggctcctgtgggcaaatgctacatgcctaatgtttgcatgccagactgtgctgtgtccctgctgatgtgcatgtgggagtccccttggtgggtgtctgtaagcctcgggtaggtgtgcaagtctctgctgctctctttgtagaagaggcaggggaggtacccgggtggtgagcttgtgcctgggccagcctggcaagggtagatgtgcagacttctgtggatgctagtgtgtgtgtataacgtctgtgtgggtttgtgtctccgcctacatgtgtacttctgataagtctgagtgtgtctgcaggatgtcagtctgtctctgggacatatccgggtgtgtctaggggtgtaagatgtgtatatgagaatgtgtttctgacgtgggggttgcagcagggtctgagcctccgttgtgtctgtttggtgatgtgtgcgtgtgatagaatgggagttgtgtggctgcatgggtttgtgcacttctctgagtgagtatcctctctaatctgtctggaggcgtgcttctgaaagcatccaacaccagcgagtcactggatgggtctgtgagatgtgtgcaagtggctgtgtgtctctgagcttgagctgtgaacagtatatgtgcatttgtatgtgcaagacagagtatgcccagggacacaggctcagccccaaggaggctgcggctgggactcagggtaaggagcagccaagagctttgctgactgtggtgacctcctctcctccacccagtgacagactagagtcctccccctgtagctcctgggagccaagaagagaagagctacatgcagaagcctactacgtggccactgggtccagacacccagcacagggcctggtacccaggagccactggggaaatatgtgttgaatgaatgaatgaatgcctggaggaacggataagggatcggcaatgactgggacacactaacactcactgtgcactccatctgcgtcctcacattgaaaagggtcctcacggccctgggcgggcgtgcttgtcccccatgttacagaaggaacaatctcacacacatgcacacacaaacatcctccactaacccccacctcccccaggctccgggcccccagcatgccttagcctagagcctggcccatgacaggattcctctcaccaaatgtgtctcagcctagacacgctagttaacaaccaaaagctcactgctctggtcacactgcagaaagaacaggcccagagttagacaaacctgggttggaatcctggctatgtaatttagagcctccatttactgatctgtaaaatggcaagtggggatggattaggtgcttcctccaggcccttctgagctgacatctagactggctgcacttcactcacatctagaatcaccaaggagggaaaacacacacacacacacacacacacacacacacacacacactggctgcacttcactcacatctagaatcaccaaggagggaaaacacacacacacacacacacacacacactggctgcacttcactcacatctagaatcaccaaggagggaaaacacacacacacacacacacacacacacacacacacacacacacacacacacacacacacggcagggaaggtgatcacacctttccgttctccctggggcagctactgatgtattaacattctaaaactaaggaaatccaccctcctgcattctcccagttcctccaagaatgaagacacagacatcctgtctgcctattggctatgaataataacaattcctcaggcgacttgggttcactgcttgcaaaatgttttcttgtctattcacacttccctgattcctgatgaccatcgtatgaggttgtccaggcaggttccatcacctttacttatttttttttgagacaagagtttcactctgttgcccaggctagagtgcagtggcgccatctcggatcactgcaacttctgcctcccagggtcaagtgattctcctgcctcagcctcctgagtagctgggattacaggcgcccacgaccacgcctgggtaatttttgtatttttagtagagatggggtttcgccacgttggccagactggtttcgaactcctgaccttaggtgatccgcccgccttggcctcccaaagtgctgggattacaggcgtgagtcactgcgccaggccccatcacctttattatacagatgagaaaaaaagcagctcagagaagccaggtaacttgcccatggccacacagtaaacgggagagtcaggtttcaaagtcaggtcttcagactccaactctcagattcctccatccacacccagtgggttcctacatgttctggccacatggtacgtgcttaatggttagtggtgatgaaaggctggaagacctcagatcaccgggtctttgaaggtctcaggtgacgtgtctgctcggcagctaaagctgcatcttagaatcctggcacctcagtagttaataaccttcagacttccttggctagaagggacccaaggtcaggcagctcaactgcagccaccacatcaatctccctctgaacccttctcaagcaatcattccacaaaccctctatctttatccaagcatgcaaggtcatcccgcctctctctgaataattaaagtgacagtgagctcactaccttctctgtagaagctccttctatcttctcactgggagagagttgcccgatttatgctttcctcacttggaccccagagcagaccataccagactggagatcacagtccttcgcagttgacagttcccagtgacccctacaagggggaggtaagcctgagcagggccacccaccagacctggtgggacctccttcaactctgctcctgcaggggacatactggggatttggagtcctttcccttgtactcagtttctgcatcttagaggcaaagtagtccagaaaggcagaaaacacatcaagagtctaacacatgcttactccaagccctggcagcctagcgaccctgctctgggacccactctggccacagttttcccatctgtggaataaacaacacaacacctccagtaataacccctctatttatggtccacatttagtctctggattttgaccctgcctctgtgaggctggcggctgggataaacagatatacagagaagttaagggactaacccaaatgtacacagtgagaagtggcatgggctggccttgctctcctctcttacccacactccttcccctctctggccttagcgctgttcttgaactcaacgagcattccaatttcccttagcctgaaatcttcttactccagaccctcactcagttggctccacggcatcctgcagccctcagcctccctgtgcaccccagcccccaccttcgtgtgctcctggcaaactgtcccctttaccctcattatgatctgtgttgtgatttcttgtatgactattgtttaattctggtctccccaaaagctctatgaaaacagacacctcatcctcccttgtccacagctgtatcccagatctgccctagcacacggcaggttctaaataaacagctgccgaatgaaccaatgaggggccaggagaaagagcccagcctgccttgggtgatgaagaggatctattctgccctcacagaatccacaagagaacaggctgggtgcacatggaaacatgtcccgtgcctctgacaagagcagtgatcagaggtttactacataccaggtgctctaatggtgtttgcaggaatcagctcatttaaccgttgaggttggaaagcgtgttactgtcccatttttacaaatgagaaagcaaaggtccagggcctttaagtaacttgccaaagatcacgccgtcaggaagcgacagaccccagatccaatagcagcacgaagcctgagccactgaatgaatggtggaaattacggttccatcttggcccaaacgtgggatgtccccagctggaccccggcccctgtgagatcccgggctcaacccccagcctcctgggactgttttcccctttaaacagtcatgggtgcctcaaacagactttgggtcagagcctgatgacttcctgggatggacaggggcccatggagatgggtgcctaggagccctgaagcaaagctctgcaacccatcccccttcaccagagtgagtagcaggaaccgggaggcaggggtgaggaactcagagtttcggttaaggccaattcaggcagcactcactggaagcagctcagagcaccaagagggcaggagcaaaagacccttgtcctggctcgtcacctccctcctcctcctcaccttccacttgccctctccttaccaccggcttctgaagactcaaagagccgactgaactcccagttgccaacaccgaacccggcccttgggaagacatcctcccatttaacggatgaggagactgaggcctggcttggggaaaggtgtctcttgattcagacagaccttgtccttccatactacaagcatttacagaactcaggctggagagcagatcccggggaaaatggggagacagagacatagttgagcaagacaccaacactctaatgagggagaagcccatttggtcagaagagccacaaggaaaagttaaaacctaagtgctgagggcagacataaaccagcagcatgctgtgagctccacagccaggggcactctgggtgttgtgccaggccatcatccactgacaagagtcggcaacatttcagcctcctccaaaaccgtgcccagccagcggcaggagagctcaggaagcttccagcctcccagggagaggtcaacacgtgcaagctgggctgtccctaaagctgccatggcacctggaagcgtgcagatggagcccggctggcacccagtaggtgctcatgtccactgaaaaagcaaaggcaaagcctgctgtccgggggaagccctagggtccccacatggccacagggaagtcctgttccaggtgggcagttgccctcctctcactgcgaacatggaaaggcactggccacgaggggccaatggggctgttgtgtgcacaaggtctgccccagggagggcaaaagacactgtcctgggatttaggaagctgcctctgaaccggttctcccacgacatcatcctccaggctgtgggaccgttaggctgggcggaagtggactccagccaaggggatgttcccagatgtcatgctttcaaactggacccgcccagaaaggcaggcagagacaggcctgcgcccgggaaagccctgggtaacgactcaggatggcattcaggcctttcctgggcaggggatggccacaggtttccctggcggcggtgtctatcaatcccgtcccaagaaggagagcctgggcgtggaggttctgggcagctgaaggcagagatccatcccttccctggctacccacccccacctcagcaacgcctcccagaacgctccaaagctttctcaagtccccgctcccaggttagggccctgtagccagttccaaggtctttttcaggagcgcgcttcccaaataaagttgagagggggcggggggaatgagggagccccagatccacctcagagtggtccccagagggcttgggcccctttctccggattgttcagtgggaaggagggccggctggtgcctcaggcccgcgggactgtgacagccggcgacccctgcgacctccctttctacccgggcgcccccaccttgagatagtcgttctccgagcgcagctcctccagctcccgcaccaagccgctgggcccgcagtccagcatctcctcggtgaggtcggagaaggcaagcgaggcgctgagcggcaagcggctgctgcccaccgacgacgcggccaccgacggctcgtccggggaggcgggcggccgcgggggctgctgcgcggagggcgcgggctgggccggctgccccgtacggacccccgccgggcccccggccgcggactcggcgtcgctgctcagcgccagctccaggcccagcaggcgcgcctcctccgacgcgcagtccgacacctccgagctgctatccgtgaggctggggggcggcggtggcggtcgcggccccgcacccgagcgcggacggcccttggcacggaccccggtgcggaccccggccacccgcacacccgcaccgcgcgccccgggagccactgcgcgccccttcttgtccggccgtgaggagaacgcggcgctgcaggcgactgctgagcccgggcctgggccgcggcggcccttagccagcgaccagccggccacgtctttgggccgggccggcgacggcgcgcggtggctctttttcctctccggggcaggcgcgggtgcaggcgcgggctggggaccgcagccccggaccgggggctcggccgccggcgcctccatcgcggcctccctcggcctcagcgagctgcgcgcatggcccaggcccgcccggcctcgacgtccctggggagggacccggcgcggctccggccgctggggctgcggctgctctcggcccacctcggccccgacaccgcgtccccgtcccaagccccgccgcgcggtctctccgctgctctgggctcggagagtgcggcccgaccgcctccaggcgccccggctccggctgcggctccgcccggcgcccgccccctcggcctcgccgcgcccccggagcgcgcccgggcccccgccgcccgcacgccgatcgctccctcgggctccgagtccggctgcggcccgggccccggctccgcccggcgcagcccgccccccgcgcagccccgccagctccccgccccgccgcctcggctcgggggcgcgcggttccgcgaacaaaaggcggacgcggcgggagcggcagggagggacgcaggcagggagcgagggagggatctgcgaggcaacagcgaccccttcgagggtcaggctggcgcgggcagccgcggcccgggctccctcctcctccgctccgccgcctcctcccctgcccgctcggggaaggcacccggcggaggcgcccctgcgcccggcgtccgggcagggcctgcgagagcggcgggagccgggactcccgggccgaggccgggcggacctcagttcgcaggaacccgcatccatgcacgcccagcgcctcgcccctcgccccgtgccgagcgtgcgcgaactccgcccccttagccggcatcgccggagccgcgatcccatcgcacagatgcgtaaactgaagcctggggtgcacgcgccaagctcacggtctaggcggcgccgatgggacccaaagctcacacctcccgggcgcgctcgggctccccctgcctcggcttccctctcctggcatagggaccgtgaagccctgtgtgcatgcctggctcgcgcaccttgaccggcggatatttctccccatgcgcccccgacccgggtttcaggctctgtacggctaaaatggaagcgacccgtagctaggcgcggtggctcatgcctgtaatcccagcactttgggaggccgaggcgggtggatcacgaggtcaggagttcgagaccagcctgaccaacatgatgaaaccccgtctctactaaaaatacacaaattagccgggcgtggtagcgcgtgcctgtaatcccagctactcgggaggctgaggcaggagaatcgcttgaacccgggaggcggaggttgcagtgagccgaggtcgcgccactgcactccagtctgggtggcagagctagactccatctcaaaaaaataaacaaataaataaaaacaaaaataaaatggaggggacctattacgagatgtcagcctagcggatgctttggaaggcggttttggcccccgtgggggctggcatgggctgggacggttgccctgaccccacacgtccccaccaggagcagtgcaggaggacttgagctctgatgggcgtgttttctttcctcccgggcgtctgggcgtctccttggctcctggccgtgttgattttcccatgtctctcacaccttccccagcccccacaccgcctggccgctacgcccccatccctgagccaccgcagggcagagctggattgagtgctttgccccacagatgtaccctcgtccttagggtgccccacaccccttgccaccagaagggcagggctgtttttgcccctttacaacctctttctcctcctgttctctcctccccctcccatttatcccctgctctttcttcctccttcttctcccatctttcccc

SEQ ID NO: 572 - DNA, 374272 bp, Homo sapiens
  source 1..374272: mol_type = genomic DNA
ttggaaatctctgctatggacagcttattaatagcaccaatctctgcttgtattctaactgtaatcattaatggtgagtaaataatctgaaatcataagtgatgaatgaactgttagagagctaccatctgcagagggggatgaaataattaattaaataaacaggcactggaagctgacaggatacttagtcttatttgatcaaataattgtgtgtggcttttttttttttttttttttttttgagacagggtctctctctgttgcccaggctggagtgcaatgacgtgatctcagctcactgcaacctctgcttcctgggttcaagcgattctcctgcctcggcctcctgagtatctggcattacaggcgcgcgccaccatgcccagctaattttcgtatttttagtagagaccaggtttcaccatattagttaggctggcctcgaactccccacctcaggtgatctgcccgcctcggcctcccaaagtgctgggattacaggcataagccactgcacccggccgtgatcagataattctttaaataatatctttctttgtggctaaaatctggaaaacagcaggaagaaatgatcaggccacacaaaccaaccacctactatgagagatcaggcagtggatgattgtgaaaagttactcaaataggttatttctgcatcgaatcaagtaagaaaaggacttgcttgtctttagtgatgatgcagctaaaggagggatgaagatctggcatgtaagtatcagagggtcccttccttccgcccttccacccacctggatggacaggtcagatggatctagttatatgacccttacacactcagatgaaaacaagaccaaaagactattatggggtatattcttcacccaaagggattacattttagcagaatgctaatatagagtgggaattatcctatggcatagaaggcaccagagtgggtgttaaggggaagcaacgtgacaagacatctttgataaccgagttggcaaaagaggaatgtccgtatttctgaatatttaagagatagatatggaaaagggtcaaaacacatagagcaagaagggactaaggtatatgagaaaagatccaagcaggcaagctggctctttcccatttgtgtggcagaaagcggggaccccaccgccacccatcatttgaaattcactgaaagcctgtggacatttgcagaagctgccgagccaatggtgctgaagctgcttagggcaaagattttaaaatttcagagtgttgaactgggaaagtgcttacaactccttgtaactaacccctccttggaaaactagctgttttgaggcagaaatattttacaatgtattgttttaactgaagggcaatttttagccaaagaacgtttagcaaatgagctttggtggtgggtttaaaaatatttcttctctgagctgatgctgacacagcttttctccatgtttgtgttaaaagaacacacaacaaaatgcattttctcttagtttaacaagttggaataaaatacacaatttttataaagataaatgtcaagaagaaaaactgaagtatacttccaagcaaaatttattagatgtctattcaagaaaaacacaatgacctttgcttgtaagaattcaaagtcaattacctggaagccaggtatgaatagttttttcttttaaaatcagatacagagagtagaaacagtaatttttcttaaatatgacaggcaacagatattgaagtcttttctcataaatggcatcaaagagaattattcatttatcagcaaagctgcatgcagttgacttaatttcaaacctgaagcctttaaaatatgaagctggttatgaacttgacagaaatcaaggtaggctactcaacgatgtttctttaccttcttcctaatgaaattcccttgtcatcagtcagtagatatgtacatttcatttggcttctacgatcttttaacttcatagatttttgcataaatgctatctgacagaatcacactatctaggggtgcttgtgatctgtgagataaggagaggctagtctgctgaaagtgttgtcgcaggataaagaccaaattaggaaacgcccctgttttctcaacaactagtctgtacaaaaaaagagcaaacatatgtacaaaattctagaggctacgtacattgtgaaaagatcaatatcactgtccatgaaagagatgccataaaaagttttatctgtaaggtgctcaagatccaaagatgaacagttcttatgcaaagtcataagaaatacaaagctagttttcggagcaggtgtaattcaggcactgtgaaccatattaaaccttccaggtcccaatatcattttttaaatttctgcttcagggcagaaaataaaacctgaatgatttaacattgcttctaaaaagtgcctaatttattcctaggaaatattttacacacaccaggaaaatcaggctcaacatattcctgtcctcaaatgtagccaggattctgagttccatagaagaaaaataattattatagtaaaaataattgtagtaatcctaatccttgctaaaaccaactttaatacttgtgatgcttctgtactctatttctataaaataatgtgtgagattctattacatttccataaaatgtacaacatatcatatggattatatgttctcatacaatctcaaatgtgtatgtgtacacacagtgaaatcttacctactagtattgcttacagatactttcaggtgtctgttagaataattctttgcacctctcactaacactgcttttacttacattttttcagataaataaaacactaagagctcattgttcatgatgctgatcattacattttaatataaaatagcgatgcaactttacaacacaatagttttcccctgtagcctagctcagcctcttgtattgtcatgattattaccgaaggcttttatttacttactgtttgcacttctaaaaaatgcaaacaaattgcagaaaaagactcctatttgaaaactcacattcaatcagcaaaatcacactcatccaaattaactcgcctcctcttgctttaaaggttgtaatcactgtgcatattacaacatgtatgtgcaggcaaacaatagctaaagtacagttacagttgtcatattgtgtaaaccaagacactaggcaaacttgtgaaaagaatacacactgccaagcgaagaatatgaaaatgcaaaccacagcattccccaataaacaattttctggtcgtcttgggggagaacatcgcctggggggagatgttgaaatggagccacgaggctggacagcctcctggagacactttttttttttttttttgcctcaaatatttgaccatttttaaatatcatgatttttttctttctgatcccacattttgacgtgtcaaagcttagagcaggaagtaggaatccacactttcacggagggggaccagcctgccatgtcgtccccaggctcacagcagcggcggctactctgctggtggtttggtggcaggtggagatggtgacggcgcattggaaaccgtaaggcatgacaacgggaggcccgcggggtgtttcaggcgcgttgacgcaggtgcatggctggcaggcggcctctacagaaggagggagcgcaattcacagcctcttgacgtagtttccggggaaagtaccaaagaatttggttcttcttgaggtccctgaaaatagaagcgagtcatgaaaggggggtgacaacgatatcagttcatacacatgggcttgaatacttcccatttacaaggcctcggaagacagcaagccccgaggggtttggaaaagaaggcaggcaactcacatgaagcccataggcagacaaaataagcagtgttagctggttgcctgacgctctcactgcccctccggcataaatgctgcgctgccatcgcggcaggctaaacagaaatgctgagcctcccaagctaaagggaaagtcagccctgctgaggaggggggcggaggagctcagtcactgaggctgccacaccagagtcgggggtgagggatcaaggcgaggctgacaggtgacagggtgagtggaaaatcctaagagcaaagcttctcagggaccagcaacccgcgcaacacaggtgcgacatgaagacatcatctgtggcaggctgtcgctgttccaacagttttatcatcttacagaagatcatggtcagtgccacatcatttatttaaaaacagcactgccagagtccttcatcgagtatacaatttttcaacaatttacaaatcattaatgaaaaaaaggattaagcactatttgtgtgtgggagttctatcagtggcatgatttttaacatggtgtgtgtttaaccacacgcacaaatggctatcataattatgttcgcctctggtttcaaataatgtaattccttggacacttcttgtaaaagttggtgcactaaattgctaaattcttctttaggcagcgcagatggaccggataagggtctctcaagcttcatctgtctcctatatcctggcacttactgccttggtttgatggctgtttttctttttccttggctaggcaagccattttacgtttctcctccctcctcctcctccctcctcctcctcctccttgtttttgagatggagtttcgctcttgtcgcccaggctggagtgcagtggcatgatctcggctcactgcaacctctgcctcttgggttcaagcaattctcctgccttagcctcctgagtggctgggattacaggcacctgccaccaagcccagctgattattgtacttttggtagatacggggtttcaccatgttgaccaggctggcctcgaactcctggcctcaggtaatccacccgcctcggcctcccaaagtgctagaattacaggcatgagccaccgcacccggcctttttttcttcttttaatggaaataaaatcagaggcttgtggccgcaccagggcctcaattctttcatgattttgccaccgatggatgtctagagtgagccctcctctcctctcacctttcctctcttccattctctgccctgcagcctgtgtttccttttcacctctttctgtggcccagtgtaaaatacttttgtctacaaatgttttcccagaagacctctcgtctttttttttaggatggtaaagatgaagttgccttttaagtgggaagaatggaacgtctctctgcttccaccacaaactaaagttaaggtgagtcactgaatgttcgggcatctacgtcagacctaggaaacgggagagctgttcacttaatctcactccctctgaaattagattctcactgtggacaactaacattttccacagcacagagcgttgatatttctcttctggggaccatttgttgttgttgttcttagatctcaatctttcctggtttttgctatttaaagaaattgtcttctctcagttgagttggaaataaagctcgcagaaaatcacacatagctgaagcagtgaatactaaactatattaaaaatgcaatagccttgggattacattgtgcatatgaatgtctgaaagatcaaaggcattacgaattcaaaggaagctcggccatcacagcaaaccacgggagtgagcaaactcaagcaaattacaaaatagccgaaggtgcctgaggaagaagcgcacatacccacaaaccagccgtcatcacacttttccatgacatcaatgacatcactttctctgagctccagctcatcttcattcctgggagtatagttatacagagcctgaaaccttaaacaggacaagggaatgtgtttaaaaacatcttgacaccttcatgaaatatagaagatagaacaatattcattcttcctttaacattcctattcttaacaacattctgttgggtggtacaagcctggtaagcatgtaaatagcattctattggatggtacaagcctggtaagcaggtacatagcaatatgtagatcttcacaggcattagaacactctaacaacattttgaaactcacgaggaatatccatgaaaattgtaacattcataaattggattaaaatatgtcaacatgtataagtcagacccgcatttcagttgtccagccatctaacgtctatcatttagacattaaataatagtacaaaatataaaataagtgatatttgtattatttaactgtttaaaaacaagaaggaatcacaattttagctagccataatcagaagcaaataatgggggcttgagaattgaattttcaaaggttctaaatggagatagacaaaatgtgtcagacatgtctttttaatcactctgtgtgaattactatacaaaggaaaattattttttttactaagaggaattctttagatcagtttaatgttatggtttggatcagtgttttctgaggatgtagaattggaagatttgatgtaattagcctatgaagttgagtagatgtattctatgtgcagttattactgattccatttcaagcagactatggacataagtctctttttaaaatgagtcccagaaaaattgtatttgattttaaaactctctcttgaaataattttatataaaaaagaattattgatagaatgctatcactttcctttcccggcctgaattctttgacagcatatactgtggtggaaattgatcaataatgaattcagacactgaatttgtggtaagaaaacaccatacattataataaatagtaacatgggctggtgtttttggaaaatgaaggcgaaattactgtagctgagaaggtcaagaagaatttgataggcagttaacatgaaaacttcttcataatagtactaaaatattaccagtactgtgagggggtttttaaaaattgggaatttgtttctgctgctttctgtaacagtcatgtcattctgctaatgtgagaaaataattaccactttctagggtattttagattttttcatgccaacttaaaaaagttgataatcttgactaccgctccggaacaagaatgatttatttttaattactttatgagtcagaaaataatattttggtagaacaaaactattctatcatttaaactcaaatcttatgtcattaataagcaacagtgacctactggcttccccccgttcatccagcatttggactgggggagctggatagagttggcttcagagaatgcctaacaacatcccctagaaaatattgttttccctggcctggcaccaaagcctgaaatttcaacattagaggcttcttctcctgttaaaacttcatccttccagtagaccttacagccacttatatccttttgagcatgggcttctgaggccttttcttgagagaggggtttgtgattatggggaagggcagagaaaggcagctagcatcccagagtagtggccaaaaagacaggcaggtgtggaatacagaaacgtcacctgatttggatgtttgcatgtggccagctttgctaggggtagtccatttattttgttgcttgtgtaaagaatttgatttggaggctgctcaggtgaaggggtggtatcttttgtgtatctgtggggaaagttcacggtcccttttccagtttcacatttgagagagatggtggttcctgggctgctgttttgatggatacacacggcatttctcactttgggaaaactgattcttttattgagcttctcaggcttgaaccctgcccaggctcatctccacccactcatggagaccggttacctaaggctgcaaacctcagctgctggaaagaatctcaaggtctcagagctaacgcaacaaaattggcacagactcctgcttcatttttgtctgatgaaagccagcatgtttgtccaaatttatttaccattctggtttaattagaccacagaaacaaaaacaaaacaaaagaaaacccacggagttttatggaaacgtaaacacaccttcaggaaatcctcctgcctctcctggctttcaaagccagtgttgcacaatgggaaatgaagacaaatccaatgttaaaaaatgctgttgtgaaagatgtgttggtgaggtgagtgatggtggtggggtaaggatgcctcaaaaagaaaggtgtcttttaaacaggaaatgctgagccagactggaagccctctcgataacttgcaactttttctagaacatatttcactaaaactctgaattgtagtgacataacattatgttcctactttggctcaaaacttatttttaaatgaaagcaactaagcaacaccctaaaatcccactaattcaggctataatcaaatataaatttaataaacaatgttttctaatatacaaatcaggactttgaaaatgtaacatatctttcattcataaacactttgaaagctgtttaatataacatgttggtaatgcaataaacctaaacagccctggaatttattttttatcatgtgatcttatcatcgtttgggtaaataagagaacaaacaaaagctttagaatgacaagtcgtatttagtgttttccagttaagcgatctttttgtttgtttgtttgtttgagacagggtcttgctctgttgcccaggctggagtgcagggccatcatcatggcttattgtagccttgatctccctggcccaagtgatcttcccacctcagcctactaagcagctgggactacaggcgcatgccatcacacctgactaattttttatttttatttttgtagagatggtgttttgctatgttgtccaggctggtcttgaactcctgggttttggccttccaaagtgctgggatttcaggcatagtgactgcacctaaccttcagtgagatttcaaatgattatcactgctaacctgttctttccaaaatacagactttcccgcaacaagaacacttttctgcctgtgctctgtgagagccagtctcatccggagctgctttttgctaagtttcaggtctgtgaggagcaaggaaggacttgatggtgataaaggcaccaggtcatatgccaggacctgccgcaaggaggaggctattgttagcctgttctgctccaggtgagcagagtgtgggcagtgggtcaggatccccagtgtgtgctcagatatgggggacaaggggttaggtccatgaataagccttcccaggggtctcactctcgactcacagtgtgggcagaggccaacaggaagctgataactcctgaacgtctctcagggacaaaatgggcccgaaaaagaaacacacagagagaatcttcaagacaacgtgtgacaccttcaggctgatttaactcatgtatcagaaaggagaaggaatttgaaaggaaagtttgaaaaggcattttcctggtgctgtggaagtaatcgcatgtaactgaataacagtgagtgttttaatactgcccttttcaaatgacccttctaagcatgtaactttggaatgatggaatgatcgctttaggtcttttttacactgaggtccacttttaccgtctcccagtgggtgtaaaagtaaggttagaacatgttctgtatgtctttgaagctcgcagttactcgttacacagccagcagagcagagagggagacagagttatccatcttaggaatcactgaagcattgggaagttttcctagtgtgtcaattaaaatcttctcagagaactatgggttcttttaaaaattagtttctggtcactgtcataaaagatggagagactattacaatttctcgtaatttaagaggcctcatgttagtttgatctttcacgtgcaaagccatacatcttacattttggtacagttgtccattttgtgggtcaaggttagtctcaaatttagaagataagaagaatacttacggttcccccccaccttgaatattttcatgagtaaacacaggacgctgtggctgaaatgaaatgattttcaatgtaatcaatgtttaaactggtactaattaaaagataatttggataatggcatggtacttttcttgacatttaatatttcctgttgtaaaaaaccaagaggaagaaaaaaaccaaataaaagctttctgcaggattaataattaaaatatttaaagggagctttaaattaaagcaaaataagcaaggtcaaatgttttgaacatgtctacaatctagtctgctcaagctttaaggaaaagtcagggtttggtcccattgatttttcaaaggccaggaataaggcaagaacatagacggcaaaccactagaataggaaatatagacaccttcatacaaccttattctccagcgttttctcaaacaagcagaaaataaaccacatttagtttaacagcaaagtatccacactcattctttcaatctttccttcacagacaacattttcacatacagcacagaggaaaatatcaataggcagacatcccatgctacatttgaattaacattttctgttctcaatgtggagagaaaacatgcatttttaaaaagagaaaacagaactttggaatgcaacgaacaatatccgggtaacatgtaacattttaccttagaagagaaacattggtagaaatttccagtgcactgaactctcaaaagagtttcttttctttttaaactaagcatcaagaccagtatctgtaatagatacttataatattggaaatgacaagccttagcatcccatatacccacattaatattttcagtgaatgaaagttaacatgtttgttgaatatataaactcagtgtaatttatattgactacctaaactttaccttttaggggagaaatgcaaacaaatcattcataatccatttcaaaagcatttgcttctaaatgatagctacagggtaaaatcagaatttgcatggcaattatataagtgactgtttgatgactactgaaatagctattagatccatgtccttagactttgggaccagttcttagatttccatagttatgagtggattactgataggctgaaatctcttgctgccaattgtccatagaaaccccactgatccaagcttggatggataattctgaggttcctttcagtctacgagtcaatgattcacccacttcctaaattctttatccaccccctttctatcctacttgtctatctagcataagactaggtactcacagtactaaaactgtaagctctgactcggttaactggaaacctttattaacagtgttcttagaaatttcactcaacagtctgtggatagaatatttaaaactagagtgcgtaagaattactgcacacaattatgacttaagagtgaaatagtttactcctgtaaatcaatatgactactaatgatgtatctattattaaaattggaagatattcatattttaagaaaaattatgactaaccagttttccaaccatcttaaaggtcatttaattcaagatattattaaatcaatttaaatatataagatggtaattgtaagtcattgataagcctgtatcatattacctatttcaagttctcttccagtccaataaaactttatatatgtataaaactttcatgcagaagtaagatttgtatacatcaattgccattaatattattttgtaataactttccagtctttttttctcagtcttctttcttatttcaaatgtctgcagaataatgttctcccacgtgtgtctacatatcatagttttcttaaccattcctctcttttttttttagttttgaagttagaattggtctagtctttttttttttgctatcataaacagcaatgctatacacattttttatgcaaagagctattttcttcttttgaactattctttagaatatattcccaggagtaaaacttctggccaaagagtatgcattaaagccatatgattttgagaatgtacatgttagtcactgaaaaatactgtactcaaaagtaacttgaaaatgtctaatatgccagactgcatatcatataccaagatagctactactctttccccaaaacaatcatagcaccatttgcagtgcataataaagttatgaataagaaaatattatttattcttgtcttaagagaaaatgttgtgtaaaatatatttcattatgctctaaaattggcatccctgttttcacacatttaaaccattttaatattttaaaattgagtaaaagtttcaacttctacatcatggcatccaatgctttgtaaaactggttagtttcatttcattgctcttttgttaaaatgtgaataccactttaaaaatcaaattgttcattaatgtaaaacaatcaacttttaaagtccgtatatccctttttagttatcatcattataattctactagtttaattcctttaactcaacccacctcatcaatcatttaactgaactgtcccattgaccattatgaaaatttggtgattgctgcaaacctgcagcttcctggatcccacgtccatggctggagaacgtatgttcctgtgtggggcagccagcaccgtccttgctttttttttttttttttttttttgagatggagtctcactctgccaccaggctagaggtcagtggtgtgatcttggctcactgcaacctctgcctcccgggttcaagcgattctcctgcctcagcctcccgagtagctgggactacaggcacgcaccaccgtgcccagctaatttttgtatttttagtagagacagggtttcaccatgttagccaggatggtctcgatctcctgaccttgtgatcttcccgccttggcctcctaaagtgctgggattacaggcgtgagtcactgcgcccggcccccgtccttgcttttacctgtttcccaatttctcttttcccttccttcatatctttcaaaccctgcccctctttttacacacaaatcatcagttttctatactgttcacatcctgaggccagaatcaatcaagacttttcgtagcagagaagttgtgtgtgtcttataatggcgagttttagaacttttcaaagcttacctttaacaagaatcacctccatgttaatgtggataactaggagacagttttgaggaaagctgactaattacagtacttgaaatagtttattttaaaggcatttgactagtagggaatgagtagcaagaacagttatctaagacggctcatctgcgtctttctgttttgggcgttaagcaccatataaccttggggatgcctcagcttccctatctctgaaatcaatgagttggacaagatgagggttaatcgggtcccctcagggattccatgaaggatacacatttccacagatgtatttcctctgctgtgtaaaggtgtccgtcatcagttttacacagagagctgggacactgacattgattggttaattctcatgtgtctcggtcacgtaaaaaaaaataatggttacaattcaactccattttgcagaatggtaaaccaaaacccaaagatactggataatttcttaatacgacaaataggtaaaaaacaaacagaaaaagaaacaaaatggtaatttcgatgtgcacgctattgcatgaaagattactatgatggactacttggcctaccttggctaaaatcagcatcttaattttgacgctgaggtaggtgcaaatgtcctataaggtgatgtaaatagattatctggggagactgtctttcgccctttccccttggtgatgtaactcaaatggcaagtcgcttaagcagagatttgtaatgcagctgcactctgtcgccacctagtggtgagcaatggcagcaacaagctgagagttgtttctgctttatctgcccctttttatccaagttcccaaggctggaaaaattttaaaagcctattttaaaggccgcagagtgatgtggaatagacagtcatctgttttcctaaccatgttcttccctccccacgttttaaatttttgagaaagcatcccttgtaaagccaccagcatttttggtccgtgtccatttctattttgactatctgtgcaggcatttccatttcccctaacttcttagcagttttaagataaatatagaacaatatacacttgtgacattcagagaggcttacatgagctgaacctagaaagatggctttcaactgacacattacaatcactgtgctgggcattttgaacaagaattatattatgcttatatttccttgatgaatcttaagagtagaacaagagaaaaatccagtgaagcatgctgcggttttcatcgtatcctaaatatgtatttttttctgtagccctgactatgtaagtatttttctgtagctattttttaatgttgtcaaaaacggatacaaaagagacaagttttaaacacatgctaatttccaaagccagaaccaatcacaagttgctgttcataaggaagctggtttgaaacatcatggagtctgtaacatcagtaaaatatatactttccgatcttagtgagctacagtctgttgaaaagccgtctaatttatcaaagcttctgcagttatctctggaggattagctatatttagtatcaaataattcttaaagaaggattgactgttactttaaacactaatgcaaaaaaatctctgaaagcaatataagcagtgctaaagtgtttttatctttttttataaaatattagttgtcatatttgcccaccagaattcgatgaaattctcctaataataccacgtttatgtttctagaggcttatttttccttcttaaattatgaaggtaaaacacaactttgcataaatctaaaaaaatagaatatttatggttcacacaaacacacgtgtaatctgacatacaaatacataatgtaaaaatcaggcaaaaaataaaaaaaaaaccttaaggggaacacaagcataccatctcgtggacccacaggagggttatagatgggtccttttcactgcaaaagaagcttatgttttgctttggctctggaaggccattcgggggagtctaagagtctctacaaattggcatttctgtctctatggcaacacaaagctctgcctcagcaacaaaatgaggtcttcctatgcaatgcaaaaagcacaaagtggcatgaatgcagaataatatcgacttttctttagaaataaaaaatgaagacttctgtgaaatcaagcccttgagaacttcttgaaatgcagaagcacggccatgcgataggccagtcaaggttgaatccgggtccattaaaacagaaatgaggaaaggaatcctgacttatgtccagatgaaaatttccaaactccttggctgcattccttagaattgatagtaagtaccatttagagtccatgtattttaaagtactgtagatactatggaacgaagtagctaagggaaagtaatttgacctttaagttcaatcagagctggcaagaaataggaagtggatagaatccagacagcagtatggggacaaaaggcagactgagaggatgtagtgcacatcaccagagaaacagaagatgttagacaagaatcatggatttaaaaaaaatccaaattgaatgacacagaagcaaacatgaccggaagtgtgtgagttcggcactgtagatgcttggcaacagttttttctttgcaggagaaacggtgactagaaagcagtgatttagtgtagaaccatgagacagatgtagaccacaaaacacacgacactcttatttgtagagtagagaatctgaccatgtctttgtggagtttggaaacctcacacacacctaaaagggaagcacatcaccaggtggtcgcttcatcttcagggtgtctccagcctcactttaaggccagttcacagcaaagacaactaaggaagagccagccctgggggcgggggaggtggccaggatgcctgccacaaagtgggggcatgctgaccctaccctgtgggaaccgctgagccctctgacaggtgagccgcagaatctcctagacatcactgggctacgaggaggcttacccaggacacatatctcgctttttacgtcagcctggaaaatgtacaagaagttagttagctctcatcttcgtcacacagacttcaggaggagctttcctggctggctttttccatgcacacacagcatgccaaactcctgcacaacagcagggcagggagggtccacagcttctccagctgcttatacagtttccacaccacaggcaccagctgccatcttaacatggcacccacaggcacagcagaaaaaggttcacagaggaaagctggcatagggaagaggccaagaacatataagaaatgttatatctttttttgtcttttatttttttgagacggagtctggctctgtcgcccaggctggagtgcaatggcacagtctcggctcactgcaacctccatctcccgggttcgagcgattctcttgtctcagcctcccgagtagctgggatcacaggcacccgccaccaggcccagctaatttttgtatttttagtagagacaggatttcaccatgttggtcaggctggtcttgaactcctgacctcaagtgatctgcctgcctcgggctcccaaagtgctgggattacaggtgtcagccactgcgcccggccaagaaatgttatgtctttcatagaatgcttagcaattgggttcaagatgctctcaaacctgccctgctttttcatcttattgaagggatgcaaggtgagatagaggagaatttggcttaatgcctgtcaaatttcatggactgtatcagacatttgttggaggcaaaattttctaacacataagaagaaaataaggcctttttggggggaaacatggtgaaatttgatgaactactgaagtgccaacctgtgggctggactgttttggtgttttttttttattttcagagtaagatctttcatatgacagtgagtaagctgaccttcttttgtgtaggttttattttccttccaatagcggacaggatctggcagtgtactgcctggtatttgatctggcttaagagaacttccggaggaataaaacacgcttaaataaaagcatgtggttttctcaactctcatttagaaaagttttcctaattctcagtaatgattgacctcaaatccccagcctctcgggatgaaatgtgtttggcaccgttgcttaagtgtcgtggcagacgatgcttgatgctctccacatccattctcttcttggtcctcagtaatggggccaggctgttgggtaggcacatggccattctggataaagaccacatttcctgacttgtagctggatgtactcatgtcataagctgagaccgaggggatatatgcaattctgggacttggccttcaagggagaaggtgtaatctcccatcttttctccttcctgctggttcgtgtgagaagggaactactcgagctgccacctgggacccatagcggaagcttctctctgaggatggcgatgagcccacatcagatggaaactcctgggttctctgatgactgcggggccaccataccagtcccggacacccttcatttatgtgtaagagcaatatatttctacgttgtttaagctataattattttgagttttctgggactgtgcttatcccagtcttgactaatacaggggttcaatgcatatcagagctcttagagaaaaaaaataaccccatttagcttttagaatgatgtggatcataacagctggaaagagcacgtgaacatattaggaaaaatcagggcctgatttcatgttgaaaaccgtgcgccggggatccccttctgatgggactgctttagggtgacgagacttcctggtgggaccacaaccactgagttacttggaagaaacctaaaaaagagcctctcactctcctcacagagcttccgctgcaacttgagaccacatgcggcaagtctcttgcaaaatagtctctcggatggaaatggaggctcagcttatagaggagctgagatttatactattttttttgagatggagtctcgctctgttgccaggctggagtgcagtggcacggtctcggctcactgcaacctctgcctcccgggttcaagcaattctctgcctcacccttccgagtagctgggattacaggcacctgtcaccacgtccggctaatttttgtatttttggtagagacggggtttcaccatcttggccaggctggtcttgaactcctgaccttgtgatccacccaccttggcctctcaaagtgctgggattacaggcatgagccaccgtgcccagccaatttatactattttttgttatgaaaaaatcattattttaaaagcagatgctcagaagactgggggaaatattggattcagatttatacattaaacataatttatgtatctttcagtcatctgtaatctataaagtggtaggaacttttacgtttatggaagattctggattgcatttacttttatggagattgtcattgtcttagaaaacactttaaagaatgaaattgcactgacttaacatgagttaactaaacaatggttgatggggttgataaaaatgttattacaatgatttcatgcgtgctatactatgtcattaaaacattactaagagtttattttctctttgctttcagtgctgggttatttcttttctttacaatgagcatcagcattcttgaaatggaagaaataaaaaggcttcggactcagattggcagagtttgtaactgggtcagatgcagaattaaactataatggcctaaaattacgagttgattcaatttgtacttaaatttacaagcacaaataacttcagtgaatatattctttcaatgactacaaaatagatttataaggtttaaaaaaactcagtgggagattcaaaaattgagatttcctcctaaataggagataaaacagagaaaatcactttgatttgctggagttagtcagaagtatctcatgtggtcattaaaatattcttttaaaacatagttattgtgaatacctccattctctcatgtcattctgcaaacaacggaaacttaaagaatatacgagaagaattttgttcttgcagaagagtaaacctttttaaatcctggctttgtcctgatgctacgatggtgcgtcctccgtctttccaaattagagaactcagattctaaggctactttccctcttattgactaagcttaaaaaccgaagaacaagttaaaaaaaaagacaagaaataaataccttggccttaaaaataaaaccacagacagaagagaaaaaaagagaaattcttagccttaggcatcatataaagtggcattatttaaaacatttcctaattattttctgccagctaagaaaaaaaacctcaaagagcaaaagcaattaaagtgtttcattttttacaaagttcctttcacgcctaacaggagcacatagatagactatgtcagcgaatgggtttggtggtagtggttttgagattgtataaatggcacttcctaatacagaaccttagctgtattagagccctaaatttttacttatgtgcagaggctctcatttcacattcaaaagactgaatgtgagggtgagctattgtttgaagtctgtcaccttttttccaaaggaaaatgttttaggatcattctgaacatagaaggaaaacatttcagtgatggactaatttcatgctgtggttgtcattaaatctctttccaaggccagtcattaattttgttaaaataattttttaaaaatagtatctttaggttaaataccagcggaactgtcagcctgcaagtctcagagatggatgctttgtgaagtgctacaaaaggatgatccttcccacatcctcatgaatttacgtcacttttgtggaagaacaaggctcaagacagtcaatgccaaagatcatcctgtctccaggctctgctgaacctgccgatcggtgggaaatgacgggagacaatgagtccactgagaggtgatggagaatggcaggcactgagctaagataccttaaatgtgatgcttctcatgctgacggccaactgaaaacaatctcatcattacttcttattatgatatacattttaatttgtttttctcctcaatctgggtatagctgctatgcaaatatgtcttttaaatgtttggatagaggccacgcccatgatgttaaaagttagcaatcagtatttatgtaacttcgtaggtcttgtgagagggcgcaaatctgaatgcatacatcttactaattaagctcattgaagacatgcaataaaccacactcaagatgcagttacctttaattttggtggattgatctcctgttgataagaatatttagggaggagaggaggtgagcagggctgagaaagtgtagagtccaggtcagaaacagaggcgaagagagaatgaaatggaggggaggaaagcaggtggctgggaaagggtgtgggtgcttgctctcccgaagaaaatgacggaggcttaaatatcgaggaaagacgagaggtgattatgcttgtctcagaatgaggttacatgctctttacggaatttcctctcaacttccaacattttaaagttactaataaccttgggaagttatatttatgacaaattttttgctttgaaaccactaacttcctcttttgaatttgattcaaaatccccaatggtatgatcagtttaatttttcgcatgggggtggctggagataggaacacctatattctatcattttctcatatatttatatgatggctccttctaaaagtgaaggaaaaaagtatttaaaaccctgcaatgactgtaacttgcgtgtaaagtaggttgccaactatagtcagcgtgtcacaaagctggggaagccgtggccccgcgtgcagggtgtgagctggtgctgggatgagccggcctagggtactgtctgtgtcagcaaagccacacatctaatcacaccttcagattgattgaattgaaaggaatattagttactgaaataattgatgtagagacacgtttggctccttgcaatgaattatctatctgttattaaataaggtgtttgttttacacaaatgcaggcctggccgggttattttgaaatacaggaactatgaaagaatttgacttggatagtagcgtaataggaaccatcctttctgttatttcataatttctataattgccagtaattatacttgcttcttaattcacagggtacatttgtgggatcaagtttctttttatttttgaaatggagttttgctctttttgcccagaacggagtgcagtggcacaacttcagttcactgcaacctccgcctcccggtttgaagcagttctcctgcctcagcctcccgagtagctgggattacaggcacccaacaccatgtctgactaatttttgtatttttagtggagatgggggttttaccatgttggacaggttggtttcgaactcctgacctcagatgatccaccagccttgggctcccaaagtgctggattacaggcgtaagccaccgcagctggccttaagtttctctttttttttgagatggagtctcgctctgtcacccaggctggagtgcactggcacgatctcagctcattacaacctcctcctcccgggttcaagtgattctcctgcctcagcctcccgagtagctgggattgtaggcacccaccaccacgcctggctagtttttgtatttttggtagtgacggggtttcaccatgttggccaggctgatctcaaattcctgacctcaggtgatctgcctgcctcggcctctggaagtgctggcgttgcaggctcgttttttgttttaagagagaggtttgcaagctaaagtttctggatattttctgcctttgttgattaaaaccactgttcaagattcttcataacatgaagatacagtacccagttcttaagtagtcaatgtgaagtcaacacaaagagaacgacctctttagaaaatcgaaaggggacagaagtgctgtttttcttttctgttgtctttgtttattattagcattattatttttgcaaagtgccgttatgtcaaaggtatggtgtacagtttctcatcctggaataggacaaatttctgggcatcaacttcctcttctctaaagtggggatgataatgtcacacacctcactgggttttgacgattaaagatgtggagtttttagaatagtgtctgatactcagtaagagctccactattagctatcattgttaatattggaagattacaaagactatatcaattacaaagacttttacaatataagtttatggtcctgaagaaaaatgggataatggaattatatcacatatttacatcatttaattaaatatggtgtgttttcatatacccactccacccccatcttatatagtatttgtgttttttgtttaaaaaaatctgttagtcaaaataggtatttattaatatgattaactctaatagctaatcatggtaaggccggttagttcttccataatcagacaaaattaaaatacctcattactgggttttgctgcattgctgtcctccttgggggtcctaggatctgtgggggtggctatggggtgttttaggcagttgggtttctcctcctcctcctcctcttcaatgtgcaggtgtggggtgccctctgacccatcgtggccacaccaccaggcgtctccttcctgaggttctggcggccctctctggatgcctgacacaatcccctcatagatgccctcatcttcctctccaatgaccggaaggggtacaggcaaggaacccacgctggtgcacgcagaggccacaaaattatcccctaggacttctggtgcctttttagggtctgagaagccccttctcatttttctcaactctgcaaagttgctttgagttgtcgttctgggatcctgaagaggctctgcatggtaaggctgggctgcagccgaggccacacccgcgtgagtggaaggtgattcggcaggtgcagtcgctggggacaatgggaggaggacagcaggttcctccttaatttccaggatggcgtcctctaggatggttggtttggcttggtcagctgacaaggttaaagcaccaagcttctccaattcacccaagaagttgtccaggaaacgaggtggtgttggggccaaagggtttgctggtagacatgaggctgtcagggacaaccagccctggccagttccctggagagctcctttatctgagccaggtgagactttgtgggtgggaggaggggctggttcactggaagccaacttggaaatgagcacggattatgaagttaagaaaaaataaactaagaaaataataataatgcatcaaaacatagcgatggagaaatgcagaaaagatgcggtggtgaatatgaaaataattttatgtttaacatagatttgaagacatttagaagatatctagatttgaaggtattttgctgaaatttaaatacataaaatcatttatgttaattagaaaagttacttcacaaatgaaactctactagttttggaaggggtcttaaatgtcaaacaagataaagatgatatagagattaccaggacagtaaaaccttgagagatttatttttatttatttttaattttttaaaaaattttttagagatggagtctcgctgtggcacccaggctggagtgcagtggtgtgatctcggctcactgcaacctctgcctcccaggttcaaacgattttcctgcttcatcctcccgagtagctgggactacaggcgcatgtcaccagtacagctaatttttatatttttagtagagacgggtttcaccatgttggccaggctggtcttgaactcctgacctcgtgacccacccacctcagcctcccaaagtgctggggttacaggtgtgagccaccgcgcctggcccttaagagatttaatgcttacttactttaaactatgttgaaaagatattacaggtttccagatactgacttagtagagtataaatgactccagagaaatgttaatgtagaatgaaaactaatagtgaagtcattttatttcctgaatgtgtgtagtgttctcttgtcctgcaggatagcccaatcttttaaacgctgacaattttctcacttatgtttgcaaggtgattacaacatatgaataaagtattttagatcattatatgttaacaaatttctaagtgaataagttctgaaaactatgtctcaaagacaggaacccatgatcagaatgaagctgagcttacataactacggcttcaaagttttaaaaaatccaaagtaaatatttacatagaaagctcatttgatgctaacgggagggaggacttctgcttcagctcccgttctctttcaaagcttgacatttatgtaaatcagaggaggtatgagttatgaagcttaatcttctgaagtaaaatatacttacttctacatacgtagtattactgatgtattttggatatagtaaatgaaacaatacatttgaaattttatgcaaaggtattaaaagtagttctgataaatatatacaccccatatgtacccataaaaattagaaattaaaaaatgtagttccagaagtgccacttactaacattggaatacgtttatctacccttaccggactagagaaaatgctacctgctatgtgcctaaaagccttgagaagggacctttcactttaggtctctccaggtagatgtctttgatttggaaagaaaaacatctccaaaaagattctggagatacactttccagctgattgtttaggataacactttacacagggaagcagccctcttgctcctggggacttagtgtgtgtgagtgggtgatgcatttcctacttaacttttgactcctgtgtcctatagtaggagtggggtattaattagatttatttagctttttttttttaagtcatcttatcgtgggatgacataaatatcacaaaactcatgtgagcatcttaatacaggattcaggacctgggctgcttagctgctgacacacagtgagactgcacgtgtggtttgcgcctaggtagacagccactcctgttaagtcctgtagatgctgagttttcaatgatataaaccactcaagtctcattcagcagtctacagaagttcccttactagctagagttctagtttataccccttgttacataacacagaagttttcatagttagatttggaaagtctgtgaaatatataataatttcagaccatcaggtttccactttcactttctgttatgccaggaatattatgtagatgagaaagaaagatcttgaattcccttgtcattactgccaccatcaccattgctatctgatgctgcgactacgctgtgccgtcaccaccacagtcaccgaaatacatgtcagcaggttaaactgcttagctttatgatggacttgcttataccgaaagccaaatgaagcatcctggtataactagatcacaaacctatacctataatacaaaacccatacaattattttgttttccaaaagcatcagaattggattctaatgcactaaaagcagaaatatcagaaataaaatcaacatacattttagtctcccctaagacaaagacagtatgtcaagaaatgtgatttaaatgtgtcaccagagtgatttataaattattaatgagttctctgtttgtaaatatcagttagaaaataggttctgtagcgtttagtatattttggatgttatcatttagaaatacattatatttatctttctaaaaatggttgtcacttccgggaagttttcttcattaagcctgtgacatcacagcatggattaccagttgggataaaaccattaagtatttcttcctaattatggacataagcttctcaacatattttttccccagcagtgagcaataaaaaactggttattagtgaaatttgtacatgcctctgtttaaaatctggtattactttaaaaacttgaaaatatattcaattacagttaaattgtattcacatcaaagatgaaaacattgggatcaaaaatattatattgccattaaatattatattaggacatatggaagaatttgttagatgtttaatgagcttttgtacatacatgcttttcttccttacaacattttatttgaaggtacagttgctttgaaatttctgtgatagttatttaaagatgactgaatggtggataagacaaatatatgcatgaagattcttatcttttctctttatcaatagaaaatactgaaggaaggatgctgatctgtaaatgctaaggtctggtaatgaagtaaatatacttaagaagattctggaaaactataaccaatcaagcaaacaaaattggatagtaccaaactcttccatatattatccatgaatacagggttgagggtaattatttgcaactgaaactcagtcttcaaagaggatcacaataaataaaatgccaagacttcagccttctaaaaaaaaatgcctctcttaagatggcagattcttagatcatttcctcatataaaatccttctcaggctcattttcaagaagtagtttaggtcactgggatgctatcttgaaacagttttttcatcggaacatgaagtgacttcacactttagtaacatctgatatgttgattttattttaccagctctcgatggtttagcttttcatgtcctagccttgatctcaattaaaataattaataaattaggcaacttaatacattttttgaatgttgagaagtacttaaaacattttggaagtcattggcaatttaaagttttattcctagaagttaatgagaaaaaagacccttacatgcctttcataaaaagaatataattcatcagaaaaataagaaaaaatttcacattgtgagtacagacaaatagcctttttacattcaccaattaaagaagcaaagcctcttttaaattacgtattgagaaagataatcatctttagcccgctcaagtgaaacagtagaactggcatataactgtcctaaaactgataaaacaaacttgaggacttataataaccgacaacattttcatttaaactaataaacatcttgacttatagactctaattaaaaatttttgctctagctcattttccatataaaaaacttgtatagatttgtcaacctaataacccggtgttcttgtgatatactattttgagatatacatagtattttgtgttgtgtatatttatatttcaaattataaatcacaattgtatatacatgtatgaatatatgattatatttatttatatgtaaagattatattatatacataaaatttacatatataaaaatgaagctttaggaaaaaattatttcagaaaacatttatgtacacaggagtacagatatatatcatacgagacttcatgatactctcgttttctctttctctttcgatattttaacttgaaaatgaaatgagcaaaattaatcattaaatctttatgccagcacctatttgagaaacactgacttatatttactgatgtggcactcacacatgtagaaacataatatgtaaatctctttctctgcaatagatatgatattctaatctaatatcctaaagtcacacaccgattatcttacttggagcttccaatattacattaacatgatagagtatgttcttaccttatttgagctcaagctgtgaatcctatcactagaatagctgtggggtattggagggtcagggtagtcctcagcaccttttgtgttcttcttgacgacctccacataggaaacagggaagatgccttgtctgttggttcctgggattttaccttcataccagttttgatcaactcttttaagaagaataactctatctccctgttatgaatatgagaaaaatgcattagaaacagagatagaataacatgaaaatataattgtcaatgttttctatgaaaaaataggtttccatttgggcaggttttataccttcagtttttgtttaatcaggggagggcaagtaaggtactagtgcttactagaaaaatacacatgatcaacatatatgtaattgaaatgtccattcaggccatcagaatcttccctaaggatgcctgattaatgtgaacgggtttatacttgtttatgctggtattgtgtgaaattatttgtctaagttatttcaaaaagcagaatagtgtaaaaggtaatgtctcaatgacaataggattattttatctctggcaggttcagtgcattggccttctgtaggaagagcttcagaaagtgcaccatagcttgctgtgagggtctgtctgaaatgggttacagaaaacacctctagaagggagaacatcgaatggtacaccgttttctttttttatttctattttttttttttttttgagagggaatctcactctgtcacccgggctggagtgcagtggtgtgatcatggctcactgcaacccgcacctcctgggtttaagaattctcttgcctcagcctaccaagtagctgggattacaggcgcccgccaccaggcccggctaattttttgtattttagcagagataggggtttcaccatgttggtcaggctgatctccaactcctgacctcaagtgatctgaccgcctcggcctcccaaagtgctgggattgcaggcatgagccactgtgcccggccccttttcttctttaatctacatgcgctaagtagtgacagagtgaactaaagggatgggggaaagagagcgccctagaatatcaatagctgtgacaagactggcattcccctggtcttcaccctgacaatggaaacccagcatccatctgagtagttggtgaccattccatacttgtcattaaagatttgaatagaacccttggctttcacaatgatagaactttctagaatcacttccacctgccatgaccgagccagtgctgcagaactcagtttaaactttaactcaaaactacacgtagcctagaagtaggcaggcaagttgatgctaccgggcaaaaactgcagctgcattcagcaggtgatacagaagctcgggcagcggcacctgatggtgtgatggagctgaaacagtcattaatctcagcccaacagggcacccttcttcaggtgctacccaagaagaacttcgaccttgagtagcacttggaagttctctttgtgttgaaacgctggatggttgattttgtgtgcttcaccaccgctgagcagaacatactcaagaaaagtcagtctcaggctggatgcaatcgctcacgcctgtaatcccagcactttgggaggccaaggcgggcggatcatgaggtcaggagttcgagaccagcctggccaacatagtgaaaccccatctctactaaaaatacaaaaattagccgggtgtggtggcgggcacctgtagtcccagctaatcgggaggctgaggtgggagaatcgcttgaacctgggaggcagaggttgcagtgagctgagagcacacattgcactccagcctgggtgacagagtgacactccatctcaaaaaaaaaaaaaaaaaaaaaaagtcagtctccccaaatctgaaaattgcaccgattttctagtataccaagaacaggtagttgctaggctgttgtgtgagctgtaagaggcattggtgaagcctttctgtagaacatggaacaggagacagagttcatgtaatgctctgtggttctcatgctaggtggggcagcccagaggataggaaagaaggaatcggctgatgatgcagaattaagactgatgggagagaatgagacaaggttctgccaggaccagaacaaaccaggactgtggtattgctcttcatcgcacctggctaaggatttcactagtaggtgtgggaggtcctagagccactctaaatattactacctcgcctgtgttgtgtgcagaggcagttacctcaaacaaatatatgtcatatttagaaagcaataagaataattcatttatcattctcaattatgtaaactagcaggttaaaagaggtttttgattgtttttttgtgtttttttttttttttttttttttgagatggaatctcgctcacctgccttggcctcccaaagtgctgggattacaggcgtgagccaccatgcccggcctcgaggcttttgatattattaagaagagatactaggattggatgggctgctagagaaatttgggtcaattatgaggcccaaagaaggatgatccagggaagagcactgcagagatggctcttaaagcggctcccccaagaggaaggatcttctttacctaggaccattcctagattccaagatagaggaagataaggattggaatatcttgtttttaaaagactgaaaaataaggcagcaaaacaacatattttgaagtgtatcaaactgctttttccttttgtgctcccgaatgtataagtccttgattttcagccccatgcccggcttcccagactaagccacagagggagaagcctggtatcccacggggaactcctctaaaaggacacagggaccagcagggaaccgtgactctgggctgccttaaagagtcctttgtagaaaatagggtaaacataaaaatgtctaaagaaaaagataacctattttagttttgaaaatatacagccttttcaaacccactgaagaacaaacaaacaaaaacaaacaaacaaaaaaccagctgggctacctttctcagtgacagctccacatttgtgtctgcgttgaagttgtatttggctatagcttctccgatttctccgggctgggctggcggaggtggtcttgcaggctgtgctttctcaggaggtgtgagtttctatgaaggaaatagtcatttattctcaaatctgcggtgacctttgaaaccaccgccatccaagagagaaagggagaggacctacctctacgtatgagatcgggaagatgcccactctcccgtggtgttctccctcataccaattttgatcaattttcctgaggatgtagacagtatctcctttcttaaatgacaactccctggaagagacacgttgacatggtctttttgtgatgtacagcaataattctcaagatcaacaccctcgctagatctgcatttgtttggcaaatatacttacaatattaaaaaatccaattgatattgagtccgattagataagaatgatccttgcaaattcttagaatgcacttaaaacattataactttagaaatgatttcaaacagagtaagtataaacattccattggatataaatcacagacagattaataagaagtttaaaggaggggacagactcttgctactttaccattagttcagagaagaggcattttgaagcttggaaaaatgatggaatagttctgcactgattttttttttttttgtcctgaagctagttggctagttagttactagccccccagccccttttgatgtactgaagcttacatgaaggaaaacaaatatcatgtagcctcagaatagaagtgccaacaccagaacaaattttatttgtggatctttgaagttggttgacaggtattttaatagaatatcttgataaggaatttattttgtgtaacagaaaagatcttacacttttaattttcagtggggcaagaagaatgtgttttaagtgcaaagacatatgccaatgcttgcctttctatcttttatttacaaaaaataaaaatatttttaagacactatatttttcaattttggctgtttctaagaaaattgtaggtatatttgatttgggtatttataattttaagttataatgacattatgcattttgaataattcacacctaaacttatcaccttcactacatcaatttttcctggcttaatcacccaggtgattaggttggttcattattttgcctccgcaattattcttggatggagggcgattaatttgtatcttctcccaagagcctcattttgcaatacatctgccctcccactctggaatcttctgcattgttttgttcagaattttcattttttaatctttttttaaaaaattttggttcagaattttcagttggatcatttattagtataggccgtttgatggagagagatttatacctgatggagaacacttctcattgattaaaagaattaatcgaaaaaatggtggtatattaaaagaatgatcacacatttagaagtgctaaaatcttcacaattgaaaatgtgttaaattttcagtaaccctaaaaacaaagaagattcatggagctttacattcaaatacagtgcttccttcttttgtgcaaatgcctaatgtaaaaaacagaaaacaaagcaaagcaagatatttaatgttcacaacacaacagtttcatttgtactaggtatgttttgtttctggaaatgagactagctttttaaaatataatatgaacatatgaatcagaggcaaccaatttttcaaagctatgaaaaagactcttttgtatttgtataggttgcatttaaaattttgaagtccttaagacacaggaaagtcttactcttaagttttcaaaactgtgtccctctcatctcagacctagaattttaaagtcccatttgcttttttcccctcacttttatttttatttgtttttgagatggagtcttgctctgtcacccaggctggagtgcagtggtgtgatcttggctcactgcaaccttcacctcccaggttcaagtgattctcccacctcagcctcctgagtagctgggattacaggcacccaccaccacccctggctaatttttgtattttcagtagagacggggtttcaccatgttggccaggctggtctcgaacttctgacctcgagtgatccatctgccttggcctcccaaagtgctgggattacaggcatgagccaccgtgcccagctgctttttaaaattaagacttctcagaagacctcgtgagccttgggtggacacccttcctacttcacatcccctgccattcctcaggtttttatatatttaagaaagctatggattgatttttacaaagaagaaatgaaacgtgtgctccgtaacattattttataaaactgatatgcattgtacaaattgtcacaccatatccacagaacagtagttaggaccggagtacagtagaaacaaagcatcttatttctctaatttgaaaaaaaaagatgtaagcttttcttcaggccagatttaagccatgttcaacatcttaatttctaaacaggatttttcttatctagttcatttcctatctcagcagcattaccaaattctgagtgatttatttatatatgtcttctgccagagacagtttctagagctattaactcatattatatgcatttttatgagtaaattattttggttattatatatatatatattcagtgtaaacaacatataataatttaatgacaatttacaatgaattcaatatctgtcttgaattctactggagaacaaagtttcttaaaggtctgtgcacataggccacaaaaaatctgggcaacaccctcttatatataagtctgcttatgtgcttccgcaaccacatgcctatctgctgagcaaagaataaaggcaaaagaaatattgcaattcaggatggtgaaaacaccgacaccaaaagaccaaaggagaaaactttgctcagaatctctgagctttgcaggctgaggatggagacttcaatacaggaatctttgtactaagttctagtcatcaaccccacaaactatgcttggaatatttggataaataaatgttatcaaattcccccagctagtgttaattactccccaatactttatttatttacttattcattcttttttttgagacagggtcctgctctgttgcccaggctagagtgcagtggcgcaacctcagcttatggcagcgtctacctcccggtgaagcgatccttttgcctcagcctcctgagtagctgggactatacaggtgtatgcccccatgcctagctaatttttgtattttttgtagagacatggttttgccatgttgcccaggctggttttgaactcctgggctcaagccatctgcctgccttggcctcccaaagtgctgggattacaggcatgagccactgtgcctggcccccaatacttcattaattcattattgacacaaaattctaaaaacaaatattcctaaattctttttgtttttcctatcctttagaattcattgtgttctacctaacatgtttaatgtaatttaaaactcagtaattctcaactaaacttaaaataaaaggtaattctgaaggaaccatttaattagagtagattgctgcattgggaattagacctcatttgtaacagatcctactgcaatgcttatctcttaaagcattactaacatttaaaaccaccttaaatcatatgatgagtatttatcttacttacttagatgtctgagccttaaaatcataaacagcttttgcaggcaatttctgaaaaggaagataaacaattagcactaatttaaaatttgaattttctacaagaaagtagtttaatgtgccttaaagaaaaaggaaacctcagggaatcatcaaacatatgtaatgttaatcctgtaagcaatttataaataagtccattcattcttcatttagatatttaagctataataggaatataatagaaggcttattcaccatcatatttaatcttaggaactaaggtagattaatgttataatgagagaataaaatgcctgcagaggtttgcatcctaggcatcattttggctgttacaaaggctcttcctaggataaatgtggagggtcaatggctctatgttctatggagattgacacagctccctctgaatcataataaaaggaccagatgtcataaaagaagtaatcattcccttcattagacacttattaacatattagcaaaaaatattagctcaattatcactgggaggctggttagtgggcaaaagtataggtgtgatcatcttgcattccctagagggctcaggaatccttcaacactctgtccaccagccactcgtcttttagttgtgatgtgatgtgacacgtgcccatcctcaaactctgggggccacagatctccctgaggtaccctgtaccctatagctagctaggccagctcttccttcctcaccaaccaacaatcccttcactccattcttttcccccatgactctggtgaactttaggaatcctggaccatttctaacttctttggggatcccacaggctctggactacatcagacgcctataagatcctctggagcggctaccagtccaagtccagcttttagtttccatccagccgtcatggctccaaggcagtttgagcaagaactctagccccggctcagggccctggacagagttcagttggtgggtggttcccaggggcagtatcccgagaactgggctggttaaaagctctttttagggatcctctccaataaaaggaagccagcaaaaatgatttctgtaggctctgtattgatttacaacacagttgacatcaggctttctcctggaccagcgggccaagaaattgtagaggaaacctattgcctccacgaggtgccctaactcaggacacttttaggtcataatggttaagttcatgggcatcaggtcaagactcggagaagcctcatggccaaaactgggccaccactagggaagacccacagctagggtcagggtgtggactgcttctagggtcagagttgctatgctcaggccccaaggaaaattgtttctagtttctcagtattttcacatttcctgtccgagttcgttactggtttgggataatttttggctggtaagtgctgtatcaagtgtgttgctgtgaaagactccaatgctattaaattaactacctctttttctggagttcctcttctttcccttggtgcacttctccccatgtcagtcaaagtggatgagtaacttctaggggactcacggtctattggaaagaacagggccagtcatggtgagtatccacttaattacaagccaacctgttccgccattttccctggtggccactacttttttccccaaatttggagagacaccgttatcgaacacatgggcataaaactcatagttcattacaaagttgtgaaataagacacaaaacaagagcatttcaaaaggaaaaatatctgaggttgcagaattataattgtctatataaatatgattactacattgctgattaattatattgccacacccagtaagacaatttatagttagagggatttttcatataaattttttccaaagctttctgtttctatgcctttgcttcttatttataattactattataagatttacagaggatggagaatttgaaaatagcaacaatttgtagaaaaagaaacattttgtggagtaatttaagactgtagtaatgaaaaagaaagagataaaaccaaagaaagtatgaggatgacaggagggtggtgatgaacattctccttctgccttactctcccctcttcgctcttcctctgtttttaaatacttattgaatctcaagatgccatgctgtttatctacgaccttcctttgtgcccagatgataaacaccttatcagaaagcaaagaaacaaagagatattgtttcttcttactccaagcaaaaaagggataaacagaaagcatcatgtcagttgccaaattgcttatgaaatattgaattatttttgttcatcttaaagcaaagcataaataatcacattacaaaattttgattgcatgtagttcttaatagtatcttataccttttgcacttacgtgacttacatatggagatgtaactagacattaaatgtattccagtagtctatgttatagaattttatcagtacaactgggtcaatatttgtcaattctttcttttatcccttaaatatatctagttatccagactaacaagaagcattaaaaataaaatttattttatccatctatgaaagaatttaaagtgctgattcataataagaaaacattgttttaggattttgactactttgatgatgtaaattctaagttaatatacttttatgatcatagggcctcataatgatcataaattttaaattactttttctaacccagggaatataagctatttttcacttgggtgaaacacaattggaaagtaaatattttactaaaaaacaaaatacttttaaatgcatttcaaagcccttccaagttacgtttcaaaaatgtactcctatctgcacataaaattgagagatggttatattaggatattaaaagcctggagaaggtagctaatttattaaaaaatgagattctgacacatttcaattagtgaaaattttgaattgtagaaattgattttttaaattctaatttattattttgaagcatgttgcttcagcctaagggtaggcaaagataaacgtaagtgtatagtgtagcaaaagtgaaagcaaacataaagactaagtagatttgtgcaagttaattaacaatcgagccatatttgacactagtatgaactgtgaattatgtctttttttttgtctgagattatattttatactataaattctgaattattaggggtttgaatctcttttctgttatctactctctgtgtgaccttggacgaatttcctttcctctctgggcccaacttccaaaattgaaaatggcttttgaaataacacccatttcataggcctatgccagttttattagataatgtatgtaaagcactctgtagtgtctggtgcatagaagtttctctgttgaccaactttcagcccggaatgttcattccagcctcttaaaatttacgtagtgaacagatgtgctgtaagaattaatgaaaataattggtcacaaatattaaaacaccctgggctgtaagttatataaatctcaaaaatagtcctctgcctttcaattgctatttattcttgtgttgccacttcaaagttatctatgaaaatagagtttagagtcactgttagcctgaatagtgtaattcaaatttcaatacaggactgttttagcagaaagagaaagtgaatgaattaagtaatggaaaagagaaaatgaatacactaaatggtggaaatgggacttttatatatatagcttaaagatacattcacaaaaattttatcaccattgtgtccttgaaatggagaaagctattaaacaaaccctaatttctttgtgtccatcaattactaatcacatatttcagttttgcttcttgaatgttttgatatagtatcttctatatagaatgtgacaaattatttattaactgaatgaatataaagttttaacgttaatataaacatttttaaaaggctatttgtggaactataggttttgattcatgtcacaacgtaatttattgtctcaatgtgagtagtggttgtttcaaccctaatgctgagctacaaaatggccttccctctcgttttcgaaagagtaaatttttgtgaattgatgatcactttaagccacacatcaagtccaaatatcacatgggcaaatgagaaatattcagtaagacatatttgcacaacaagtttttgcttcacaacacataacgacgccaaatggtctcccagctcgggagtgatgagatgttggaatggaaaatgaaagagctggagggtgggtctctgaaccacaaggaaaaagaaagaaaagctcatccaccttggagtgcaccgccacggtcttggtggtggcagctgctgttggctgtgtccacgtcttggaaagaggcactgcggggcattctcccgcagtcattctggtagggtggacaatgaatagcaccatcgggaggcagtgggtggagaggctggtgcagggggctcctcctcagcgctctcagggatgagttcctctcgggaacatctggcagcagctcactgatgaggcggtgcaggatgctgttgtccggcaagctcccccttttcttttcagctttaatttggtcacagatgtctttaagggcagagtccagagcctcaaacacagatgctttacattttgccttttcagtctgtttcttaggagccgaattttttttcctccggaaaggcacaggactgactagaaaagcaagtttagaaaggccagggtccatttcttgccttctgggctcctcggtgttttcgtgtctggctctttcgtgttttaacattgtggtaaatcgagtgtaggaggccgggcacctgcctttgcaggagctgatgaggtggcggtggtggtggtggtggtgatggtggtggtggtggctggatccgtaaaagctttcggaggatgtgaaggaaaagtgatcaaagtcactttcactgcagaaggatgacccctctaggtgaatgtagtcactgtggtcggacacaaccccgtcctggtcgctgtcggaaaactccacgtgtgctcggggctgctcatcgctggtgacttcaatgtgaatgggcaccagggcgttagactggcagcctcgccggccccgagcgggggggccgctttgattttcttcctccagcaaatactcaatggaaaaccgcctcttgggacataggccattttgcggtggttctagggttacgggagacagcatgtcatcccctaaatttggcatggatttggacttctggatcagcttttcgaattcggagatgcgtgtgggcaccatgtcccggggcacctcctccgtggagcactggctccaggcgcgcagcaggtccttgtgctgctgctcgctctcgtactgcagaatcctggacttcacggagcagatcacctcggagttcatcaggtccttgcggttgatgcggtgcattttcttgtacatcttcaggaaccccggggcgttgcgggctgacctgtgtctgatccttgatctgccgttactgcgaacctccgggacgtagggggacccccacgccatggggcagctctccttggagtcctcctcacataacagggagcccatgctttccgacttgactttcgggtccgggaagctatcgcagtcgtcgtttaggagatcgtcacagctccgggatttgattttgggagagacggtttcttccgtgctgctccagatttctgcgttttgccgggccatttgccagccgttcttgaaactaatggctcttggtgagtcccgagggacatccaagtgctgtctgtaagtgctacagtaatctaactcactggaggggttgccgttgagccctgagtaactgcaaagggatggacatattttgctatcatccccaccttttaatccagagcagcgtggtagaagagagacatttggagaagttaaaaggttcacaaagagaggagagcatgtcagtaaagcatcagacagcatagcaaggagaaagcagttagtgtgttttaatctaggtgctgattgttcacacatggagcttcaactctagagaagaaggtctaattctaaagcgagctaatactttttcagtgaatgtagctttgcagagagagttgacaaaactgtgtataagaagcaaccgacgtaagcaaatacacctactcctactgcataattcatacacctttctgacaatattgtttgccaaaacacaatagtgctgcttcagctgatagcatgatctggtagtgaaggtttaacaattagtgtcaaaagtgttatacccttacgcaatttaatagggccggaatttgagcctcatttgattcgtaatgatacataggtgaagaagggtttatacatttacatcgaattaatactctcatgactatatcaaataattttttgtgggttttagattttaaaagctataaggcaaagtattctccaaaattgcaaaatcaaaatgctgtgaactattgctgctaacatttttctagaaaaaaatagctaaagctctttaaacaaacgaatttacctcttaaattgctctacctttaaccttttattaggtacaaaattctcataggaaaactgaatataatgcaaaactttcatcagaggtgcatataccatgctttttttctcggaagagttctttgaaaaatcatttgcaatttgataatagagatctacatttggcctcaattttgaatagctatggaaatgttcttttgctttgctgagtcaactaataaatgaggagccaaattatatctaataggacattttcttcctagaaataaaatctaatggaggaaaatatctctattcaatacttataccttacaatgttctctaaattctttaaaagtagataagcacattaggtagatctgtactgtctgggaaaggaagttgatttaacattccctgtgatgaaacaaatatctacatttatcagaacccttttaacttttggctagtatccaagaataataggtcaatggcatttcatgacctacttgttaccttaagatattcatttgaataagtgagttgaatctgataaggcatctctgctcctcagaggaaagatgtgatggatggggctcacacgccctgaaccatcagctgatatcacagctttacaaggccttaaaagggctaggcatccacctactcagagtccaatcatcacgaccagaataccttttgcacacaaatcagctaccacttttaactaccatgtggcaatggttttagtgactatagttgataggtgtagctgaattggtctggttttatagaaacttacattagagctcaatttctttacacatttcaaaatctctttctcttctctttcaatcccaagatattagaggagattgtggggtcccacatttggtagagccctagctccctgtaggggctggttcaatcctcactctccatctcagaaatattcctgtcctcaaggaataccactaaatggtcttccagaaaccagaaggagtgacttctttcaacagtgagctccctacacttgcagagaggagacgggccatccagaaaaaaaggcttggtgattcctcagtgatatcattatggtttgggaccaattagtcctgactgtgagctgctgtgaattgaccactgtgttacatggcaggaggtggatgctccactgttcatgtgaaggtggcccaaaatatacagcaaatggctaaagaaattaataggtcggatttttttaaaatctagaattgaataattttttaaaaccctccaaaccaatgtatattttagccaacaatttgctctgttgctgcttgtaatttttatcctataaatttgactaatttgctagttgtagaaacattagaaaattttgactatatgtcaatgtttacaaaatacatcttttagtagcctgatgatacattatttgatactttcaatttgtttagaaagggatctatttgggggaaaaaagcattagcagatgctagtcagagttctttaagcaacctaagtggctcgccagcttgagtcagtctgggtgggaagaaggctattgttctaaaactatattttattccagacactgtaggtgagagctggcacatgccactatcactgggccagctttcacacagtgctctaggctaaaacgtaaactagtaaattgttgtgttttcatttactatgctcaccttttgctcttgatggggaagaaggagaagagctagtgaaagactttgtaagagtggtgcttgatcctgggaggtccactcggcctgggctagtcctgctcgcactttgatctcccaagccccgtggtggacccactgcaggctcgctcttcctccgcttcctgaagtcactggccatgcttgcagaactgaaagaaggaatcagatctgtttgattggcactggaggaggttcgggtgtgcaccagaaaaaccggtggaacgtgctagtgacaatggcgtaactcctaaacctctatccccaaaactgcattgctaggaactcatcccttgatgttcaacatgatttctctagaaggatcttttaaaaaatgaatagaccttattatttattttgagatggcttctggctctgtcacccaggctggaagcgcagtggtgcaatcacagctcactgcagccccaaactcctgggctcaagggatactcccgcctcaacctcctgagtagctgggaccacaggtgggtgccacctcacctggctaatttttttaaatttgttatttatgtagagacagagtctcactatgttgcccaggctggtctcaaacccctgagctcaagtaatcctcaagcctcagtctcctgaagtgttgggattacaggcgtgaaccactgtgcccggacaactaaatttttttagggcagttttaggcttacagaaataatgactggaaagtgtagagagtttccttatagtccctttcctcttgcacagtttcccttatcatttacatattcttttggtgggtacattgtcacaattgatgaatctttcctgatgcgtcgtcaccccaagtccatagtttacatttgagttcatgttttgtcttaaacattttaggggttttgagaaatgtataatgatgtgtgtccatcattaatgtgtcaatcatataaaatagtcttcccgccataaaaagcttctgtcctccagcttttcatccctcccttcctcccgctcatcctggcacccactgatctttccacacggcctccacagtttcgccttttcaccatgcccagttgatatcatgcagaatgtggcctctcaggttggcttcctgcactcggtgatacacttttaaggctcctccatgtgttttttgtcacttgatagctcatttctttgtattgctgagtcacattctattattacatggatgcgccacagtttatgtatccattcacctattgaaggacatcttggttgcttccaacttctagcaattataaataatgctcctaagaaaaccacctgctggtttttgtgtgaacctaagtttttaaacatctttgaacgtcaaaattctcctatagtgtaatatgttgattgagaattcagtgctataatttgtatcttgtatcttttctctataaagcggagttctaacaacatgaatatatccagaggggcataccaaatacaggaaataactgaaaaaaaaaaaagacatcaagagaggaaaatctctctcacctcaagggttgcctgcagcttgtcctatcatctctatcatcttagctttagaagatgttatattggaattccaacattttttatttaaataatgaatgaaggctgagtatgatggctcacgtctgtaatcaagtactttgggaggccaaggctggaggatggctcaaggtcaggagtttgagaccagcctggacaacctagtgagactctgtctctacagaaaataaaaaagttagccagttgtgtcatgtgcctgtagtcccagctattcaggaggctgaggtgggaggatagcttgagcacaggagtttgaggctgcagtgagccatgattgcaccactgcactccagcttgggcaacagagcaagaccctgtctcatcagtcagtcaatcaatcagtaccagtaatctggtcagcaaattaactattaaagattccttcccctcagttgcataaaatactgtcaatagtctagaacagcagggagtttctgtcatggttttgagtttgagtacagtatcatttaagaccaatgttaatgaatgaagccacatatggcacagcacactgtgcatgaaatcactggattcttagacaagacttgtgtagacaacagtgataatagcaacagcagcaaccccagctcctatggagcccagcagaatgctatgtgctttctttatgtttttgtcttatttagcccacacagcaaaccgatgaggtatatgctgttatctcagttttacaaatggtaaagtgaatacatgtgtctgggatgtacggaagcaagcggagaggcagacctcagaactggtttgtcctcttctgaagaggatgcatctcctagacctgtttttgctgggactgtcctgtcatgtgagggtctgtgtgtctttacggcaatctgtagattagattaaaactctaaaattcaaatattttaggtgcatagatagaggcagaagataaaaaggaggggttccagagttcctttctcagggatgttattgcagttggatggcactcagaaacccaatttatgattgacccaattcacaaagaaatctacatagaagggtaaattaatgctactagataaatatttgttattgatgttacaatatggctgggagtttgtattattcaatattactattgaactatgtctgaatatgtctgaattttgtgatttgtttttttttttttttttagactgagtcttgctgtgttgccaggctggagtgcagtggtgcaatctcgactcactgcaacctccaccctcccaggctcaagcgattcttctgcctcagcctcctgaatagctgtgactagaggggcatgccaccatgtctagctaatttttgtagttttagtagtgatggggtttcaccatgatggccaggatggtctcaatctcttgacctcatgatcttcccccctcagcctcccaactgctgggattacaggcatgagccaccgtgcctggccatgaattttgtaatattttttaaaaagtgtgatatttaaagctaatggaacttacttcaggcgaactctgagggaagttaggcctagcggtgacaagctatcttgcctcaatttcttttttttctctctccttgccaactgtgtaaacttggtaagttactaagcctaggtgtcactttcctcagagataaagtggggacaatagtatttaaccatagtgttttcttaggattgaatatgttttgtacttatgcctcatttattggtagtattaataacagtatttctgatttgtgtggtcaaagtatgattaacaaatacgtgtataacactttttaatctataatttttttcaaatatattattataagggccatttaacaacattgaaaattagttacttataattcccatctaaagaaaagaaaactgggtataggggactaagggaagagaaggatttctcagtctgtgaaggaatttataattagttcactaattttttagaaattcttgaaatgatcatataaaatgatgctgaaacaaaataaaacaacttcatgaggcatggtacttcaaataaaaatgagtgatacatgatactcattactacttcactgaataattttattgttgaaaaagaaaccactggtatagaatattctgctacaacataataagattcttacctcatgggtctttccaggcttctgtctatagaggactgatacaaggaggcctgttaagataggataatagtaccatgaaaaattttaccgtggcaaaattttgttcacttgtcaacattaaattaggtatcctaaaaagaatattataaaaattgaggttgaaagtaccattcattatgactataaaaatgtcttcccaaagagagatcatgcgacctgatttctacttgggacctatctgctttcccttctgatataatgcattgcagttctctgtgtagctcaaattatccacaacccaagcattgcatggggggaaattaataatattttctcagggacactgaaataagagctaaagttatcctacagcctgaactgcagaatcttacctgttgactgtaaatagaaatttcctacagaaaggaatggtttgatgttttaaaaaatttgtagtcatcattcaatccttataaaacatcacattttaaagtttttgttattgttgttaccaagtattgtcttcagaatgtaacacataagcagaacttaagacaccattcatctgtcaacatagacatgacgtttaaataaaacccacagagtttgacttgaagaaactaaataaagtacctggtacttcaatcaggtaaatagttatacttttacaattaggtgagttcagggctagtttaaaataaatgagctaatgaagcaaaatataacttttttaaagtgcgcttttaaatttttccttcattctgaataatacactgaaatagatagtaagcaaaaatgataatatgaattttttattttccatggcatctgctgggataattgctaaaatatctaaaaggcaagagaggacactgagctatcaagtgtttgaggtgacactgtggtatgatgtccagaaagcacagggagatggctgggtgcagtggctcatgcctgtaatcccagcactttgggaggccaacgcgggtggatcacctgtggtcaggagttcaagatcagcctgaccaacgtggtgaaaccctgtctctactaaatatgaaaaacgagccaggcatggtgacacattcctgttatcccagccacgcaggaggctgaggcaggagaattgcttgaatctgggaggcagaggttgcagcgagtcgagatggcgccactgcactccagcctgggccatgagagtgaaaccccatctcaaaaaaacaaaaacaaaaaacaacaaaaaaacaaaacaaaacaaaacaaaacaaaagtataaagaaagtatagggagatgtataccaagtatagatagttttgcctttggtcatatttgatgatcaattcatcacagataaaatttggtttgatgaagaactggaattctagtttaaaaacatttgtctgtatgaaagcttaaaaatgtcagccagaaaggcaaggtttgacaaatgttgtcttaagttgccatcatctagaaacattttatcagagtattaaacatctacttagtggaaatcaaatctcactttacaaactatttctataactcagttttctattaattggtaaattagcaccaattaatcaattaaaacaatacaattttgcaattctgtatgtatatcagtcttacaaggtcccttttgcataacttacgcttctattaactaatattttaatttaattctatcttactaaatgaaaatggaatcttgtctagaaacaaaagcatctctgcatgagaatattcccatcctccttttagacagaaaaagtggattgtaatatttttagttcctagaaaatatttagatttctaggttctcaacaaatataaaatcaggagaaaagtttggtttgctagtctgatatgtgtacatggttattttaatttgctgagctctgaatcagacactgggaaggtagaaaaatagatactaaatatgaaagaaagcaaacaagtaaaataaaatcagatcgttatattacaattaagaaatattaattctactcgtttgcagaagagcgacactgaagagcctgagagcatcggcgtctgtgcagatcacggctttcgtgggacaccctcacacacagctgatcaccaaaaagtgtgaagttcacaacactcttagaacaaccctacagtgatcagaaaatttgaattgtcaacttataatgagcctaaacaatattgtaatgtgaaataaaacatagtgtaagaactgattgtgttttagggttaggctaagaaactactatttctccttgtactggtttctacattcaaaataaatgaaaaccagttttgcggtttcatgtacactcagagaaagttcagtattaaattgtaagataagagtaaaaaatctagattgatgactgagagaaaaacttgtacaataattgtaagaagtgtactcatcccaaaatgaaaattatctccagaaaagaggttacaaattttaccagttatgatctactatttacatattaccattattttaacacacttagaaggtcaatttagtgaagtacagatactgaatcactctttctgttaagtagctatgagattaaattttgcttaaatatccgtaactgttcttcattaatgccagttttccagttatggattaaaatctatgttattcatggtatataccaggcagttgataaacggtagctaaggtaatgtctaatcaattacatttgtttttaccagaaatgtttaataacaaaaggttattaaagacaaaatccagaaccttaagagaatatattttcttacattctgaaaaactataatgtgaaattaataacatagttaacatatgctattagaatcatacagcaccccctctcaatcccagagataactggcaaatagatcaactactggcaaagtgctttttatgtgttgtttttttttttttgccactaccatcacataatagaatgcatagagttaagtttctactatttttatgcccaagaattattgtgtaatattaattaacagaactcttttcacaggaattcaatagttaacaagaaataatattaagtaagtaatttgtttttaaaagatttatcctctaaatatatatcttggaagtgctgaaaagtgtgatataaaggaaatagcacagaaatgaaggttaagagagatatatttttttttctgccactatcttaccatgtgattttggacttatttcttaaaattattgcactctacttttttttttaactgaaaaatgagtgaattggacatgatgcactctaaattccatttcagttatctatgaaccaactaccttaaaaacaccctagaaatatctgagaaaaatatctgaccacattgaatttcaaaataaattcttgggttgttcatatgttgaaataagactctttctgcagatattaaggtaacataacatacagaatataaccccttgttttatttgattttcttcagattacatgcctgcctgcctggctataaaatgtaagcctttagaaataactgaattcaataacccagaatgttcctgattactctattttaccttttatttaatatataaatattttgatcacttctcagttttaacacacactctgatgtttaccacagggtaaataatttgaaattgcaagttgagacgctagaaatttgcatattttcttgagactctatacctgcaattccagtggtcaccactatgtgtcagtagtacctcctacaacacaacggttctactggttgtgtttcccagttgcacatatttaagacttttaatgaaaataagatatttattgtgttatagtattcacttaagaccacagagcaactaatgtgcaaaaaacagtttatttacttcgttcccatgctagttgcttctaagagttccttgcaaggaggcttttatatagctgatggctagcaaaacagtgccatttctgcttgtgtcttctaatgagtcatttatccactttctaaagtaattttctgcttttctttgcagagagcaggttaacaagcttttgactctgaatcatttctgcctgtatcattctctctttcaaataaaactctgattcaaataaaaatatacattggctgccataaatttttcacctagttgattattataggctcttaagtagagattgcaaacgcatttcattttatatgccaatgataatttgttatagtggctgcctggattacagtgttgaaaaggagtagtcatgtctgtcatgggtatgaaactgggaagttgtgatacacaatttccaggtatttgccagccctattcttgactgataatacaatccgtaagttgtatttaggaaaatgaaagaacaaaaataaattttagaaatatatgggacataggcatctgattatccacactccaagcattataatagaatggttctaagaagccttcttgtagtattttactctgtctcataaaaagaggtggttaatatatgcactaagactaatacttttgatttttaattttcacgctgctgaataccagaactacatagaatagtataactagcagttgtggttggaatgattcttcacccagagtccagagatagccaacaactctggtataattaatgtccaggcaatgatactggatgcaacataatgatgcaaagatagatattttttcaaaaatagcttagacattacagagaattgtaaaacacagatgtgcagaatcacagtcacagcctctaagggagatatctgaaaaagagagaataacgtgtttttacctcattgaaaacaccagaagaatgatcttgaacatagtccagaggctttttaggaggctgggtgtagacgcaccacagaagcagaagtgtagggatggaatggaggagagtcaatggcagcaaggaatgaacatgtggaaaaggtgacaacagttagaaattgagtgttgacagcaccagctacacaaacagaatgacatgaatggagcaaaatgggggcagctgggaggaagtgtgcaacgtctgcaaatattctcaagcactgggaaaattggctagtgttcaattagtatatttataaattcattttgtcaaatttcattagcactcctagtctctggccacagaggaatgcaaggtaaattaaagaaacattaaaggagcaagtggatagcatgctggtgagtttccatgtgtgactgaaaatgattatggaaaatgctgataacttaggctcagtacagaatagtccctataagctttctttttgaattattttattttattttattttatttttttgagacagggtttcactctgtcacccaggctggagtgtagtgacaccgtctcagctcactgcaatctctgccaccagggttcaagtgattctcccacctcagccccctgagtagctgggattacaggcgtacgccaccatgcccagctaatttttgtatttttagtagagaaggggtttcaccatgttggccaggctggtctcgaacccctgacctcaagtgttccgtctgcctcagcctcccaaaatgctgggattacaggtgtgagtcaccacgcctggccgtccctataaactttctaaccaacagcaacaatacatataaaataaagctagagaatgtttttccttgaaataaaatacatttacattcacactaagatacaaatgagaaaaaatgagagaaaacattcctcctatgagataataaccctaagaaaaatcctttggtttatattcgtttacagtcacttttgattcagttcaataagctaccttgagtctaaccaagtctcctttgcagtttaatggacaaaagagactaccatcaccaatcagtaaaccatatatggtccatatgcaagtatataaatcagcatatggtatagaaatggttatatcctgatttctaaaaaaactatcagtgtaattggtaggttatttaagagtctaaaacgcataaaaacgtgtgtaactgacacacatcaaatgcactgctgttggtggatacagttcctaatcagggaagttgttaactgaacctccagttgactattttttttttttttttttgagatggagtctcactctgtcgcccaggctggagtgcagtggcgtgatcccagctcactgcaatctccgcctcccaggttcaagcgattctcctgcctcggtctcccaagtagctgggactacaggcacccgccaccatgcccaactaatgtttgtatttttagcagagacggggtttcaccatgttggccagaatggtctcaatctgttgatttcgtgatccgcctgcctcggcctcccaaagtgctgggattacaggtgtgagccaccgtgctcggcctcaagttgactctttatcccaaacaggctaagcaataaggcccaacctctgggcttcctctggcgggagtctggggattagagaagctgtgatggctttcactagcaagtctggaaattaagatccacaggacttcctgatttttttctttccttatatccctaatggtaaactaggtacagtcatgtgttgcataatgacgtttccgtcaacgatgcacctatatatgatggtggtcctatgggattataagactgtatttttaccatgccttttctatgtttagatatgtttaggtacacaaatacctaccattgcattacagttgcctacagtatggagtgcaggaacctgctgtacaggtttgtagcccaggagcaacgggccatagcacacagcctaggcgtgtagcaggctctagcatctgggtttgtgtaagtactctgcgatgtttgcacaatggcaagtccacctgatgacacatttctcagaacccgtccacatccttaagcaacacgtgactgtattttgtagtgggattactctggcagtatattatagtgagaactgcccagagattttcatttttctttaacaggctctgcgtttaacttcttactctgccatttactattttgtgcacattacttaacccctccagtccccattttcttcttcttggcgggacatcaggaggcctcgaggagataatgaagacagaagcccgcactctccaggtgcctgatgtttgctcagcaaacaggactcaatgtcaaggtgctcttctgcttgaactagaccaaatagactgtaaacaaatacaaatcttctatacagctgtaataattgtctgaatattccatcacagaaactacctcaagattttgaacttgtaatgaattagatgtaaagaaatcttaatgaatgacctacaaaccacataggaaatgtctgagcacatttgaccatttggtacagaaatgaatctggactacgctgtaccaagtgtgtgtatacattatgcattcggcctttgttctctgaatgacacccacgtctactgataattgtattttagaaatcaaacagtatactcctagttttcttatattaatagtctagcctcacttaccgggcgtccaaactccagttctgaaaagaatttataccagggctcattttctaaatctatgtcatctggatttatgcgatcagtctagagcagatgtgaaggaaaagggaaggaaaaggcacactgagcaaagtgagggaaacgctgtgtggcatgaaaaactcacgcgcgcattgacacgcaaacatgcatcaactctcaccccacgaacctcagcaggagagaacggaggaagtaaagtaaaacgagtagcatgaggatgtgaaggcgagctccatggcagggggtccctagctgtttcctgcgtccatcgtttctgattggcataagttgtgggcaactcttgcttgagttgatccacttacgcttgaggcatgaactatggaccactctctgcggcagcgagactgggtctggctggcacgcctgatgtttggaataggctcaacccagtcaccaaatagctcttttgggcgagtcacttcatcgtccctgccctcattggtggctagcagtcccagcatgggagcccgcagtctgcagacaattcactcgggtgcaggcaggtggtaagcctgggatggggaagggtgcgggaggggtgggaagacaggcgagctggggggagggggacagggcattggggggctctcaggggcctgtggatgagaagattctggggcctggatgggtgcgagcgggacccgggggagtgggagtcgccaggctctgagcaagcaagggctgcacctgcacctctgccgggcatgaagaaaggtaaggaaggaaggagctcacccgggtgggagacagagccggggcgcgcgagcttggtgtgggggcgccactccggggcggaggggaggggctaccagtgacttctccgagtcgggagctagaaagaggcttccggccaggttcccttggaacaggtgtcggagttgttgggagagggggctgcaagaaagaggggtgcagaaactggttcattagatggaggctctgggcggaaccgcgaggacaccctggcagcgcgctgtgcctgcgttaggccgggaggggagaggcctccggacggcgaagtgtccctagggacccagacgcctcgggagcgatccgggccgctgcgaagccctgcccaccaggagtggatccccaggattcacctcccggctgcctgctctgagctgagaaggggatctggttcttcacaataccgtggatggcggggaaggggagggagcctggggtaaaatcccatcttggtttcctcgatgttctaatttagagaaaaagccagttttataattgacctgcttccctgcagaggtttctgaatgttgtttttaagatgaaaaaactagcagtgttaatataaacagttggagaaaatacatacaattattctagtaatagaaaacagatgtagagtgtttaccttacccagcagtgtccttaatattttcaaataatacatggctgactagattgatttaggctgctgattttgtagtaaatctaagagcttaaagtactatatacaagttattacttctttgataattactatatgacactaattaaatgtggtacaattgaagagtacagtatcttaagtcagaaaaaaaattctaagaaaaattatatggttccctaaaagccattcactctggctaggagaggagctgtgactcccaagacatattctaggaggactattaagtgctcactgcttcagaacaattcaatatcatttgcttacaattcttaaagaaactcagggacttaaactgaatagcgacatcttggttgtgaaaaaaatgctatgtaaccttcgcagtgctgggagcttgaaatgttccatattccaacaaaagccatgattttgacattgttctactgttttattgactcgttgcatttacaagttttgctaatgatacacagtctacacttactaataaattatactcacagtgtttttagtgatgtgactttgtttcaatattttataataaaagattataggagtaattacagacaatgatagaaaagtttgaggcatcgtgacaaaatagtgcaaaagcctaagttatccaaaagatgtagtgatcataattataaagactgtgtagtgtccctgggaaatgcttacaatgagataccaagcagtcaaaacggaatctaaccacgcacctgtacagtagttacaaaggtattacaaagcttgtctctgcatgaacacagtaaagaagtcacacatacacaaacgactacaatggtgttctggtattgcgactgtttgttttttctttcttttaaatattattttgctttattgttgtaatgttatttttgtaataaataaattcagagagaacatcctactattagacataggaaaatgcctagaaatcttgagatatttttccttctttatgccagtattatatttggtttacacctcagaagtaatagtgaaattggtagagacaaaatattctagtaaccaatttgctattttctgttgaatttaaaaatttaattcaatttatatttgattcaatagttgcaatagtattaattgagattttaatgtccataaaatactatttttctccaattattatttagatcattatagatgcataattgttcgtgaaatggctttgctggagctggtttttagggtaactgacaggagagagaatttccagtaatttctcttctgtttagagagacatactatttcttctacaggaaaactaacctctgactcttttaaacttcatagtttctaatgttacacactgaatgatatcattaattattataacttctgttttcaagaatagtattttgttttgccaaggggagatagaaacttctcttagaggaaacgaatctgtttaagaaacattatgaacagcagagggcagccaacttactaaatgaataagacttgttagctatgtagcttcactttgactcccacattaagaaaatatgtaacaaatggatataccaagtcctgatttatagtaatgcatctctatgatagaatatggaaaaggaagcagaatatctaccatcttgcatcataccttagaatggcagttttccatgaattatgcttttgtttatttaaatagtcaatttatagttacaatgggcaactatctagaatgcatgccaatagaaattagcagagaaaacacccaaaacaatgatagctggtaattatcgataactttggaatgcaatgaaaggcacatgtttgagcagagttgtgttaaaggaagtgttagtggcagaactagaattttctctttgctgtggttgccgtattgaatcttttaagtcatgcaataattaaatgtcctatggtgacctggaggcactgctaaggaacacagaagcctcgcaacagtcagtgacacacatacagatggtcagtcaacagatggatatacacacaaatcactaatctcagtaatttaacactttccatgtggaacatggacattcctttgagtacagcactaatattaacactcagaaactcatttaggaggtatgattatggtttactctaattgctcataaaaggcaaaagagcaaagatactgatatgcatctttctagccttggtgtgatttttttgttgttgtttcttttcattaaaaaaaaaaaaaaacccaccagcaaacctccgtttaaaactaactttgttagtcatcagtgcaagaggacgtgttcaagaaaagctacaactataaatcacaagtgatccttacttaaaagctaccaagggtgaacaactttaaaaattttagtgttttctataatttaaaagcatttaattgcttttgtggttatcgagattccactaagtattctcagtgaggcatgtgctttctatacgttgttctaaacaaaaagaagtgccagggctattttgtttttcaaattacgctcattccattttaagttttaatgacattgactaccgtgttttatatttattgtggtttcacaataaatgctatatacattattagttgggataattcttaatggtcatcagatgaaactccttaaatttttatagttaagtattgactgacaatctttattgataaagaagcttaagttcattaagggtttaagttgcatttcaactctgctacagtgttttcaatgactattttcttctgcttttatcattatgttcaagtttagttattgtaggttagggtaacattttcatatattttttttttactttatcaagcatacagaggtcctaaacaaatgctttattaatttttttttttaaatttaacattactcacctacaaacatatccaatgcaatgggatataaaggttttagtaatataatcccagcagagtttttatgattgtctcatggaaaaattaaattgtggaaatacggttctgatttgtggttcgagtcagttcaaggcaaattcctggtgactgctaagtacttttccagatcaaacattaggcccaattaattaacatttctaaatttacagtcacatgagtatttatgagcttcaaaaaagtgcgctcacttttactttccctgttaaagaacataaacgcatatgccactgattcctaaggaagatctctttgccagggtcttgggaagatttttgttcaaacagtactacccccctgccttctctgtatcccagggaatcgtggaattatgagtcactactaatagcagtgtgtcaaacccctccaagaatgttttgagacccactgggccttttgcactagaaatatataggcttcatggataaacaacagaacaaggattcagtccctcaccaactttttccactgactgcaagggtgaaacctgtgttccttcattcacttagaaattccacgaatgcatattcactgaacacctgctacaggccaggcatcgtcccaggtgttgggatacaactggtggaccagtcacagccctcgccttcaagaagctcaagatctcatgaggaacacagtgtgccatgggcacacagcagggagagcctccaacctaatgcagaggagtcaggcacattccctgggggaggtgggactgtgctgggacctggaggatgggatagaattctccatgtgaaggaagaggtggtggggagagcttttcctggtggggaggtgcagcctttacagaggcccagcaatgcgggaattgaaagttctctgtgcagctggaacctagcgaggcagggagggtgggaggagagatgaggctggagaggtcagctggagcccagtcacaggtcttctataaattatgctcagggtttcagattttgctcgaaggacagtgaagagccagagaaaattttgagctggaggttttataaagattttctaaagattgccttcgctgtggtgtggagactagactggagaggtagggaaatgaatcaggtggctgtcactgtagcccaggcacggacaattgtgggccagaagagaggagcagcagtggcacttctcctggcaggcgacactgagtccactgcaggagaggggaaaacccaagatgaccctttggaaaagtgggcagatggagaggccatgtagagattcaaaagagcaacacagaattgcccaggtgttgtgtatatttttcaaaaattgaaaatgaaaagagcaaaggaatgcttccaaggcatcttggagtcaaaagacatgagaatgcatgaataagaccttgatacccctcagcgctggccatcgctgcgacgccactctcattcagcacgcctgctcttcaacctctagcctgtattttcaacacttcagaatcttatgtaaactatatcagtacgcggccagtctctacatcaccacggcccacttggctctttttgttttctaatttatagaggcaattgaaacgaagtcaggactaatttttttaaaaagatgatgagctggtcctacactggaaaggctggccaacatgtcccatatggccagctcaaaccattctgcttaaggctggtcctctccaaaattgtttaggagggttaacatttttggttctttctatttctccataagatagccattctcacttccttccaagtttctaagttccttctacttatcttctcctgtggctgcagagacctatccacactcgaatctctgtcacactcatggctccagagtttcctgtcttacaaccagtcacatctactggtcctgtgtggtaactacttagggcctaagtttctgataaagtaaatcaagtatactttattgtaaattagccaataaataaattaatttatactgcaaaatcatcaaataagggaatcaaataactgctacttcaatgtgtttcctgctcagccacacctggagtggctgtacagcagcgaccaagtgcaccaggcatcagtatgcctgggctcaactcctagttctggctcccaccatgtgtccctggggcaaggcgagctaatgtgtgtttcagtctcttcatctgtaacatggaaatgccatgtgtctgcttaatagggctgctggaaactttacatgagataaggcataaattactaattacagcgcctggcatatagtgagtgctcaataaagatttacaatgattgctattgctattattattgctattgtaaaacgaggagtctttaaagtcttttttaacccaaagacaagagtaatgtgacaatttcaataacaatgatagggtcaatgtataaaccctaaagggagcaaagggagggttttttaggtgtgcgtctgttttaaccatataagaggctgtttactttgcacaaactcagatctagtcttgcatagatattaaatgatagacttgaagttcctcaaggtagagagtgtgtcctgttccccgctgtgcacctcacataaagcctggcatgtagctggtgctcagtcagttttactgaatgactaaataatagaaacatcgtggtgggagagcgtctaaaaccaatcctgtttcctgacaccacggctaccaaagcattccaataccattaccatgttcgttatcctaagagtctcataaattactagaaagatcattaaaattttgttatttaatttaaatctgagatatattatttcactgttttcaattttctgcaatgatgacattgtgtttcactcaattctcattctggaaatttcagagtagcatgatactcaatcacagaaactagtaaatgggttacaagtttgcaatggtgcctgcaaatcagtgattttttttttctttcagtttttcttttgtagtcctgttactctaaaagatatgagttatttaaagaaagggtaagaaggcttagacaaatatcatgtatgaattatctgatgataaggttttgaacatgcttctccagaacacaaccgcaaacacagggtttcaaagactcaatcaaggacactcatgttgggtgtggcaaggctagagtttccaattaaaccacagggctggccttggattatatatgagtgtgatttcttggagactcttgaaggagctccacaaagaaaactctctttttcctgttcactgacacctaaaattcttttaaagcaaaaatgagagtaaattgcaattgattgcaaatgttttcctagaagtaggcttggaaggagatgcagaggaactgtggagtttcaaagaaaatcctgaggacactgatttctgaggggaagcaaaggacatgcaagggagtattggggaatcaaaaccaaagaaggccaagggaagacctatgtgtgaacctgcgcttcgaggaggcaagtggttcttcttaagtgtatagatatttttgtttgcatataattaaataattggaaaaaatcctgcaaagtgaaatataatcttgatccattagaatgacaatcaatcaggaagcttgaggcttggtaacctgaggagggatttaataagaagcaattaaaacaacttgttatgaaaagggcatttggaaaattctcccttcatccaaagaaatattaaaaagccaatatggaaaacaagggatggaactgcctgggtccatgtatattggggagattaattaatgatttttctcattagcaagctatgatagcaattaagtattgcacttatgaacttttttaaaagttaaactctgattaatgattaggcacagttagagttacatgcaaatgaatcttgcatataaatatatatatgtgtgtgcatacacatgtgtatatatgtgtatgtatatacacctgcatgtgtgtgtgtatatatatatatataaatacacacacatacacacacacatacacttgtatttggtcagtaaagacaatatattagaacatgtatctttcaattctgagatgagatgtacaaatcattatacaaaataaacatgatttctaagtgattacctttgtgacaaaaattgctaatgggtctgaaattcaggtttattggggagccctgggagcccagcgagctggcatattctgtttaatgacaagtgcttactggtctttcatgctgaagaattgatgacttgccaggttcatattcaaaaatactccttggctcagaccgaaattttcttgtgtccacttttctgtctggaggatcccagtcatgcctagaaataaacaataaatcacacattaaaataatcctttttgcttaaagcaattgtgtaaaaccagttatctgttttcaacattacttttagcatagttttaaaaaaaatctctcaggataaaaagttaacctgtgaaaaataccacattcccccgccactggctccaaaagtcacatgaggggtttgtagacgcgcagagagtgagtccctgggttcctaatggcagctgtgtatatttgtgcttaaaataggtggcagtatgctctgctgaactatgagcatttaacccaccactttgtgacctttgggatccttgatccaaagtgacaaggagtaatgcacacaccatgtttgatcttatttcttgaagtgggatcatcgcttgggaagagcacagaagtgtcatgtgggttggcgtgcaccagagcaggcagtgtggaacaggaggtcgtcttttggtgtgagccttgaaaaaccagagtcaaacatctcattcatgggaaccagcacttttcccccaaggaatatcttccaagaggctgtcagaagacttacgaaggaaagcttcaaaaaagggtttcacaaaattaagcttttctaggctactgagctaaagaagaaggcttctttttttttttttttttcgagacagagtcttcctctgttgcccaggctggagtgcagtggtgtgatcacagctcgctgccatctcactcaaactcctgggctcaagccatcctctctcctcagcctcccaggggccatgatttttaggaggaaggattttctgactgtagataggggtaattctgcttccatggaatggaatgaaattcttgctccatggcccgttggaaatagaaatactctaagagacagaattagggacaagccctagctttctactaaattcatgactgatatggagcaagaccccttaaactttctcagtcttcatttttttccatttgtgtaaaacacagacagcaataatgtgttgttcttccttgcagaggagttttgagcattacatgagataatacatatgaaagccatatggaattttttaggaggttatcatatgttttaatgagatatttaattttaacaaaacatatcagatgggtaatacctttaaatcaaaacgttaattttggttattttttgatgacaaagataacaatttgtgtctagaaaactgtttctcaattttaaggcctcacataattcatcctgaggagattggtattaaaatgagacccctttcacacacgatgtgtgtgttttggtgggatgctgtgccctatatgatcatcaattactctattataaaatttttatttgttttttttttttagtgaagatgggatttcgccatgttggccaggccagtcttgaacctctggcctcaggcaatccacacaccatggcttcccaaaatgctgggactggctgggtgcagtgactcacgcctgtaatcctagcactttgggaagccaaggtgggtggatcacgaggtcaggagttaagaccatcctggccaaggtggtgaaacaccatacaaaaattagccgggcgtggtggctggtgcctgtaatcccagctacttggtaattgcttgaacccgggagtcggaggttgcagtgagacaagatcacaccattgcactccagcctgggtaacagagtgagactccatttaaaaaaaaaaaaagtgctgggactacaggcatgagccaccacgcctggcctgatcatcaattactcttaatggtacaatagggtgttgaatacaatttttctggaatgggtatgataacacttaataaccagtattaataagaaataatttttatattcttatttattaattgctaggatagcataggccttgggtttaatcagagctgagcttggaccctggcttggacataacgagctgcatgagctgagtaagttcctaccattttctaaactgcagtttcttcctctttaaaatagaaagtatctcactgggttgttctcggaatcaaatgatatgacacagaaaaagcacttagcctagtgcttggcttgtaatgagcgctcaatgaaggttacctataagtagaagtattagtcataatcccagtaaaaataacacaataaaaaagtgtttataaatttttattttcatgtagatagtttgtataaaaatatttcagtggagaaaggaaaactcgtattagcttgaaaaactggtagaaacaagtcacagacacttattaactaatgcctcattatgatttttgaataactttccctgctttcaaaaatgtctcttattaatagacctggggaaacagaaaatgaactgcatagcctgtaacctggtatgccaaaggaagtacatgtccattatttctatttacttgtctcttatatgtatgtattgatcaaaaagcagaaaatgtgtccatattacttcaagtctaatttagggcactccagtatcatgaaagaagacagggaaaacatttgctacaatcccagcagaggaggtcaatatggtatatgtatagactagcaagattacacatccgctctctctgtggcaggtgcactgattcttctactgaatgccatgtagacttatttttatcctaagcgaaacataggccaccctggggggaaatgccttacttttctgttgaagaccgatctcttggtcgaagcggcgggactggaggtggaacatgtgggggaggcactggggaggacgcatccttaaaggcattggggctgttgtcggagtggcttttggaaagaggtctgtaggtttgggtctttgcagcagggtgtgactgagcactgtagggtgggttgtacagacctatcatgacaaaaaacaaaagcagacaaaaaacagaagcaaatcacctcttaaaaatgaattaaattatttgtccccctcaaaatagccaatgattgcatagaaattattatcaataagcatattcataatgcatacattagaaggtagtttcttaatttattaatattaatgtactaatttccattaatttattaattacaaatttattctgtacctaagccctgattacagtaaatctttgtcaattatttcagaactagtaataattcagactggtactaggaatagacttataagcactcagcaaattttctcttcaattgtatacactaagaaaatagttcagttttcagagcaagattaaaaacggaactgtttccaaatatcttctaatactttaaaaaccctgatttacatatgaaaattgacatgctaattgtagtcaaacaaaatattgcacacagttgtgtttataaagtgctgtgcaaggtacaaggaaacatgagtcctcaatatgcttagagtgcacctgggaaaatcagacacaaatagaattatgatggaaaataattggtaaaagataataaagaccaaatgaagaaaacacatagtaagaattaaaggatgctagtaggtggtagattgctcagagaaggtattatggaacccacgagtccagagtcagccctgaatgagtttcggtgagcagggcaagaggggagcagggatggtatagaaaaaaaggcagaaaagtgcaaggtgtgaagccatggcttgcacggttagtagagagcaaagagactagctgcagttgactcgtccactgatcaaatgatcagcttgtagggctgtacaaagtaatatatcactgctgttccattcactaatcactaatgtgacacaaacctcaatattaaaacagttataaaaattctaaattttcctgcacccaatcattggagctaattctatttgtacccgttcgcttctcctgaaagtccatgcacatttccacagcaaatgaaaagagacaacatctacacttacagttttgcttggattcaacagtcggacttcaacttttgagctaaataaaggaggtgagtttggtgggcgtgggagcagggatgaaattaagggaaacatctttgtgggcctgaagctatcagtggggcgagccaagacttaaacccagagggcttgctgagtttgttctactgattttccctctatcaatttgtctttggagataggagcacaatcccaaatagttaaagggcctgaatgtggtctccaggggtgcagaacaggaggatcatgcgaccccaggctgcccagaggaccccaagtgaggttgcagctgctgaaggggaggggagcagtgccagcctccgagcctggtctaaagaaagaagaaaaaaaatagttgtgcacctgtcctgagcctgtgactgggcagggagaggagccctgggcagaatcccgaggcaacactcaggagaaagtgatgaagggaaaaacatttgtcaggggtccctccttccagcctgcagacccctgcacgagataccaaggctcgccaatccaagtggcagtgcctggaactgaagccattctattgtgaccactggcaattctgagtcagaaaagtggccccgccaagggggatttttaaactctttcaatgaatggttgcattttggagcaaaaggcagggacaaggtcacagaatactttgtttgacttgtttttggtgaagtgtatctgaaagatcttacacaattgtaatcattctctctgctgataaaagatctttatcttattttgtaccctgggttacagtgtgtcctttcagcctatccttcacactttggttaaacattcctgaagctgagaataaaccaacagtgggaatgaatgagataaaccagtattagttctcatttccatgagaaaagtcaatccttttgttatgcacgctctgagaaaagaaaagaaatcctcctcctaatatatgaactgaaaacatgtgctcaaacagaaggggaaaaaaggtgaccgtgtcgttcttccaaacattgctgagcataaaatagtcattgcgagcaaggaaacccatcctacctgcattgtatgtataaggagtattatacatgtctgtgtcatcatctagaaaatgaaacataaatattatggtaatatagattgtcaccaaaggacaacgagacagcagaacttcagacaaacaacagaaatttgttagaaaagcaacgtatttttcctagttcataatgccattttctttctttttttctttttttttaagagacagggttttaccctgtcgtccagtctggagtgcagtggtgatcattgcttactgcagcctccaaacctccaacccctgggctcaaatcattctcccacattagccttctgagtagctgggattacaggtgtgtgccaccacaggcctctgcaaactgcccttttttatctgtaacatattcgtcttgctgccctcttcgtagcatgcaaagtcaggcccttgtcctcgcttccccagaaacctctctgctctggatcgcaaatttcctttactaagtgctttagtggtctcctgtctacagagcaggctcaggcagacccgcgcaggctcactctcctgatgagagcagacaggggtggacagaggaacaatgtgtttttcacccaggcaacacaccaatttagactgtggacaggggaggatggagggctgaggccagagtgcctggttgtcctccatggggaggcttcttggcagctcaggtgggaggcagaggcacagggatctgtcaccggaggggtgacagaaggagaacaggaggcatgctgaaaagaaaggggacacggagtttgctggggtcttgacattgtgtgtgaatcaaaccgatgcaaaagacgaatgtagtcccttcaacccacaaggacctcatcagaaagcagagcagcagacatacccggcttgtgcaccatgtgaatttgcttaaacatcgtcttgtaccagtccttgggccggtcgactgtctgtaatgaagagagcgtccaatggttacaaactggcttccaatcaacatcgcttctcagtgttttcatttctctattttatgttcttaataacagagtcccattctgtgataaaatgttctgactctttgctatggcttcatgacagtttcagcaatttacttagttatgtgtgcagtttgtaaacatatggccttgtgtttgaatttaggctgagttggaacattagatgctatggttttattttttcaagttatagctgtaccctgcactagagagttgatatttgcacaaatatataaagttcacttaatgtaagttattgttgtactaatttgtttaactccttttggtagataatgatcattatccttagatgctttttattgaatgttctgtaagacagtgttttcagaattaactggggaatatttttgactcaaattgtattctgatcagtgtggctctagagaaataaatttgctatttactagtctaagctactaaaatactgaatgtagtaggcatcccagagtcctacggaaaatttaagaatgtagatattgcttcaaaaatgctaatatgataacagagtgtatacaacatttgctcggctaaaattgtaggttccttgagagtagaagtccttacggatccaggcgtcggacatgaggggagcagtaggctgtagtggaaagatgaaattaatgtagagtcttgaactaagattcaaatcttggttccttaaattgctgcttaatacaccctagcaatacgaatctgggcaagtcatgtcaccttcttgagcctcagttttctcctctctaaagtgacataattatatctaaatcataggattgttatggaaatcgaatgagacaatgtatacacaagacctagaacaatgcctagaatataacaactactcaataaataataacactagggaactgcaaatatttgtagaatgaaataatgaatgaacgtagcctattggatagagctctgcctttctggatacctgtaaaagtagacacatgcttttataatcgtactcacagattttgcttggcaagatcttaccccaactctctgagagctacctgggcaacaggcttgatgattctgcttatagtaactaaacacaccagacgttccaagacagatctcgatttaaaaacttctgttaggactgatacgaaagcattcttatacttactagactgagctttgggttagattttattgcctgatctttttttccccagaaatgtggtcactgcatttttcctctggacattaagggttttgtgctatatctaaatttattttgacctctgagaatatattattctgaaaaatcaccccaaatacaggttaacatgaagggccacttgacttcgttatgagtcagctcttcattctcggctctttctccatggaagagttgaggttattgattgactattcagtcaaaggacgggacatggtggaagggattgcagtggtgaagcaaaggtctattatttgctggttcaaagttgctaaacatgtatctttcaagaaagtttatttttataaaggactgatttctctttcattaaacctcatttcttttactgtaccaaagcaacagaaaatacaacatagtgttgtgcaaaaatgttttcctggacgtgctgatggcaacaaggaagcctactaagtaagtcctatcactgtatatggcaatacatgttgacagacaggtttttttttcttcacttgctggagggcctatatcaggtaggatctcacagtgatgccatctgctagctttatatggtgagcacaaagatgccagaaaatgccctgctggcaaagggaaatatgaagctggaaaaataaaatacgaaaactctatgtccctttctaaaagaagtactctaagcatttaaagttccttttgtaaatgccatcatggagatcgctatgcctaaggctgagaataagaaaatagtctactcaaatttcaggaagtttacttttgtacgtaaaatcattttgcatgaaaaatagctactagcaattcactatgccgttttttctacaaccttgactaaatagacctgaatttttacattcctacagttttcaaaacatcagaactctacactgatttaacacgcagagatttcaaaaaagataaaaaaggacatattttctacatagcagtatacagtgactctgttctatttttttctccttttcagttttgaaaatactcaaacaagtgttatattggaagtagaagaaaagaatcttgtatttcacttaactagctggccttaatgacacaatctcatgggagctgagccctggcgatttttgttgttttgaagaacagcactgaaaggttcacatagatgtcccaggtcacatgagagagggcaatctggagagctgattccctgcattaaaatagctcaaaagtactgtttgttgactcttggctttctagagtttctggatgactttacaaaattctgtttcctcggcataggctggctgtctaaaacgatactgcagcatggtacattgtgacagtaccgcctttggcaaatacactgaatctgatcatcattactttctacacatgagaaagaaaaacaaccttggagagtcttggcctgctgtggctcagagacagcctgacttgacatttataaccacagctatacatggggatgtactctggagggctgtatagtcagtgtaagaggagagtcctcatagacctggaccttctttgtcaagttttaaaggtccaagtaagacaacaattgtgcataaaaattacagttccttataaggaacttctgcattggttatattgtgttttctattttatagaagggaaactggcattaaatgtttagtgtgtttgcttatgcatacccaaacgtgcttttgatttggcagttgataaacattttaaaaattttaagatgatttaattttcatcaaccatctctagcatctcagtttttccttttgaaactaaccaggcaaagtctggttagttaaggaaattatgtcttataaaggaagaaaacatggaccaggcttgcatgtccattatatatcatttattgacctaaaaacatacccagatatctttgataaaatcctctcagacagaatctataactacatagaatcagggctttcttaattttgtctatactatgcctcaagtgccagttacacaaaaccaatgacaccatttctgtctgactgtctatccctatataattagaagaaagtttcaaatttaaccattttgagtcagaaatcttagaagggaaatgaacaagaaaacatcatcaccagaaacatgtaatcatcataaaatgaagaatattggtcataatccctgaacttttctttggcacataaatatggcaatcgtcagtttcaagacagattgttagaatgtcatatcacattcaacgtttcctcaatctaaagagtctaaaaccccagtaactgctgtacagatttactttttggctttcaattgtaatatagatgctgagaataatccattttaaactcttctgtctgtatataaaacacataatccccatataagaatgtaaagtcaaggagagaagaaaatccccacactttatcgttagttctttttgactgtttccaatcttaccacggctttttttttttttttcctgctctctttcccattctttgcctctatcccttattgtcttggctgcccaggtctgcattccaggggagcagctcttggccacaccccagctttacatgggtcttgctgcaaagtatatgcagctgcagtccctccccgcatggcccccaacttcacctgcaaaggtgttgttgctttcatcctgtccccggcttccttctcccggctggcacaagccttctcttccagtggacttggtcagccagctgctgcctgcccaggctctcagaagctgcctctgctactgctgcgttttgccggaaggggctgcccagatacactgagcaatgctttggcagagttttaaaacttaaaaaaaaatccaaacactttcacttatcatcccaggagagctctcagcaggcacggctgaagagggacattaaaatgtgtatttttcttcagacagcttttcctttccatgacattaactctcttcactccaatcatctcacctcccaactcccaaatcacagcttccaatctcccggtgttaacacacatctatttcaaaaaacgaacacatcactgctttattcgcaatgcatgtgggaattcaatgcagccaaagaatttccattgtcttgttccttctcttttctctctattgccctaagcctccttggtaaaaggtaaaagaaaaacaaacaaacaaacaaactaaaccacacaacacagttttaccatttaacaaaatcgcaatgttcatgatgtttcattcaaatggaaaaacagattgtgtaattctctcccatcaacagctttctttctctgccacacacagcataacattcatgagaagtcggatggcacggagggcaatcctccttatataagaccctaggaatgcacaaagccgtggacaatccgtcctttgtggagtctgtgcacagccccagacagacgcacacgctggcatttcctaccgttctaattgctgtggggattccggattcatccacgggcccgatccctgggtaatgcggggctttgatgactgtcactctcttctcttcctctgaggatcggtacagggggatagagctgctggtggtgccatccagagactgcgcatgctggggatatgtgtctgtggaatctgcacagaaaatttggtaacatggaacgtattcgttgcacagggaatcataaattcatgtgtcttgttgtatatttatgccaactgtaacacagagaccatattgccatcactgtcccttttaactcatttactttccatctgagctggtggaaactgtgtaggtgtgcggggaacagacctataccaacaagggcctcaccattttatgaagaaggctgagggaagaatggcatttgttaaatgactgtgtggaggcctctgagttaggaagtgctctaaatgcattatctcttcttatccttccagtaatctttgagggagggcaggatagggggagcaagaaccagtgttatagataaggggcaggagctgagacaagttcagtaatttccctcaggtcatcatttacatcaatattattcttgtgatactgctactactattatttataggttttgaaatgtatttccagacaaagacatgactgttgagtcagtaacagtgatttcataaaaatgaagcaaaaccaaaaatcacttaaaaaaatcttcacatccaagcctttggacatgaaagcttctgaataaataaatgctgtaaaattattagtacgatttcctatgtgcatttttaccttaaaatatcaaaaactatgactttttactctttgatgacaaaaactgccctaaggatataatttagatgaggcttatcgagttcttcatgttttttagtaacttctagaatactttcagaagcaacagagtacagacatgcagtatatagtccatttacttctaatacacaggaattttaaaaaaatcatcattattaccgttcctctggtatgattaataatatgcctttatatttttctgcaattaatttgaaaatgttggtgacaaagaatgacactttgtatatactctttatatcatggtttgtcaggactgccactcagaaagtcctttaaggtggaaatgaaaaaaattctcatgtttcagggtgggactcattgatatcattatgtgtatatgatatatatcatgtataaatgtatttttcatgaaaaatttgtataaaataagtaagctttttttttttttttttgagatggagtctcgctctgtcacccagctggagtgcagtggtgtggtctcaacctcagcctcctgggttcaagcgattctcctgcctcagcctccagagtagctgggactacaggtgcgtgccaccatgcctgtacaaaaaatttttgtacaaaatacaaacaattttttgtatttttagtagagacggggtttcaccatgctagctaggatggtcctgatctcctgacctcatgatccgcccgcctcggcctcccaaagtgctgggattacaggcgtgagccaccgtggccggccataaggaagctttttaagaaattttaactcatcaatataagggtaattaaaattcagatctctctgaggtaaaatccattgtaacatttgtaactgctattactatgattatgactattttcaatttagtttgcatcagaaagtcatttttaatacattttttgatgaagaatggataaggctagttataaaactgctttatgtgcagtttatgtgctggatggtgacataaaatgtccctgaataaacgaacagcatcatagcctttcaacactgaatcagtgctggggaaggaggtgtgctggctgctgtcaaagaagacatggtggttgaagtcccgggttgtagtttctttccccctgctactggccccttgaatgtgaaaataacattcaagctagtccttatttttacttctttattttttttgagacggagtcttgctcagtcacccaggctggagtgcagtggcgcgatctcggctcactgcaagctccacctcctgggttcacgccgttctcctgcctcagcctcccgagtagctgggactacaggtgcccgccatcacgcccagctaatttttttttttgtatttttagtagagacggggtttcaccatgttggccagactggcctcgatctcctgacctcgtgatccacccgcctcggccttccaaagtgctgggattacaggcgtgagccaccgcgcccggctaagctagtccttattaagacacggtgagatatttgacactaattgactttctatttaattccaaaaaggacttgagtgggcctccatgatactagtatttttattagcgacgaatgttttttgaacaccagcatgtgcaaagtcctactctaagcaaggagaatcaactctgccttcacatctgatccattacattctatgaacccataccttatgcaatataagttaaccctttattttattattctcatatatggtccactagctgtcatcttagcaatcttttgtcctaaactaagtgtaaaattcatctagggcaaggtagatgtacatattcctccgaaaccttatcacagcactggccagctggaatttgttcagtgtttacattgggaatttcttcccatgcagaatattttatatgtaaaatctacttatcaatatattctaaaatcaaagcctatctacattcaagtatttttgttgttgttgttgggtggggatagggacaaaactgcattcactaagacaggcaatgagacagagtcaggctttgttaataattatttgggaaaaagctgtggctagaataatttgtcgagttttactttatatgtgtgtaaatgcatagttccattttaaacaatctagatataatggacttccattataacaccacactatgggctgattgttaaagggcaaaatttcggcataaaccagttttactttcttaactctaaaaggacatcattgtaggattcacagatgatcctcaggcatagcatcagcgaaggcacagatatatttagactttaataagtcccgcggctacctttaaagttttatagttatagagctttggttgacctcagaagctgagttccaccatgcacatgctggatggtgacataaaacatccctgaataaacgaacagcatcatagcctctcaatactgaatcagtgctggggaaggaggtgcactgtctgtgtcaaagaagacatggtggttcaagtcctgggttttagtttctttccccctgttgctggcccctgtggccagaggaccaggcctctccttttctgggaggtgcaggatggtgctgctgtcctgagaattcccctctgctccctgctgtcctagaagcttcctagtgagtcgacatcatggaaacttgtacagcctgaattcctatgatagttcaatttcgtattttttttgatattttaggtttttaagttacatttttacaaactaagaaatatttatgggccgggcacggtggctcatgcctgtaatcccagcacttagggaggtcgaggcaggtggatcacctgaggtcaggagttcgagaccaacctggccaacatggtgaaaccccctgtctgtactaaaaatacaaaattagctgggtgcggtggcgggcacctgtaatcccagctactcaggaggctgaggcaggagcatcactggaacccaggaggcagaggttgcagtgagccgagatcgccccattgcactccagcctgggcgacagagtgagactccatcttgaaaaaaaaaaaaaaagtatttatcacattattttctgaactatctgaacatacttgaccatgtaagagcatttctatcactgtacagcaaagcttctttcacaggaggccacaaaaagtccatgagccccaggaaattatctgcttacaattttttatgaacgtccgtatgtccatttgttttctggaggagagctctatctttcactgaattcctagtcctcagagggttgagaacgattgctctatacaatgacagaaccttcatttaagggaacacttaagtttctcttgtgtggcttcctgctaccatatccctgactgcaggtcttccagccttggtttgaatggtggttttctccttgtgtgagccagtagatgactgcgtccctgctatgtgggacagcctgtcctcctgttacactgttttaactgtcaaacgattctcccttatatagaccccaggaaatagtccatggtggaagctcttccaagtccgaacaagctgccctagtggaaaacctgcattcatgtcctccagtggcacaaacccccttgccctaagtagccattttctttttctttctactccaccacctcagacatctaagtgcccacaccaggctcagacacaggtggagacatggtcttggaatagcatggtgcccatttcctcccatgttgggtcctctgccccagtttctccctggggatagggtcatgagtgctgagcgctcccgcctcaccttgatgccgcatatctttctcctgtggttgtacttgccgcattgaggttgccatggaaatcacggtgagtaaattacttaccgagggatgtgccgtgctgcatgacaatgctggagttgagtgaggctgggagagaatatgccgagggggaaaacggcctctgatagtaactcatgggactcacggcacctcctgagtttccattcactgttatctggctctgagaaaagcgcaaaggcatcgagttaaattagcacatagttccctgtaaacatcattccattaggtgataataaaagacttccaatcacatgagagtaatcagctgccaagctcttatttattttgaaaactgatgtcagagggcatgctacattctttgccttctctctattcccttatttctgaaaatcactctcttgtgtatctgagggtccagggagtggttaggaagaatgaaagtggctgactagtgggcatgccactctgccaacagaggtgccaaatggtatcagtaggagtcagtaccaagtaaatgtggaggacgactttgctctgacagtcgtaacatcagcaatcagaacacggtggtgctgttccgcatgcagcattgacgtggatgtcctttgacatgaggcaagggattggttctcagacttagtcagggatatcttctagtgaatgaatgtttccagagctggtgaataacataaggaacctagttgtttggatgtatatatcatgaagcaacctattctagaaggatcaaatacctggtaaaggatcagagagacatgttcaaccactggcttctccctacttcagcctcattgagcacttcatgaatctctgtttgatttcttaattattcattgtttcgattgttccgtatctgactattttatatccccaatggtatctcaagcttcttgttgaagatggtcatatatatgcttctttaatattttgtataacatgcagcctagtgctgatgacagagtagatgttcaataggtatctattctgatggaactgaatcggcttagttcacagatatcgagctcaggactattaagcatgcctgtctacccacagcacagtactgatcattacagggcgcacacaatgcatgcaaataagatcaaacattagtaagaacgtttagttaaaattatagctaaatacacacaacacacataggcacacagataaagaagcataatttgtgaaacttttctacttattttaaaacaaaacaaacttctattccacaggcttgaaacatagatatagtaactgtgtatttctatgatttcactttaaagcaaatgggttttcaaatgacctagaataagtctaatttcattactgtataaccataccacttatgtccccaaatcaataaacatttcattacaagccttgtgcttattgattaaataattctctaagctgttagaaaaattacactcatatcataaccagccacatcttgaggacctgctccctggagagagctggacgttcaaataactgtgaggcacaggcctgcccaaatcttcagagcttttatgtacctctgatggatgatttgagaacactttcacctccttgcccaagttaagtttggtggatctttgtcaatatcattgtaatactattataacatgttataattaatgttaaaagctgaagaatccttcttattaaaaaccatcaggttaactatattgctaaacctacaaacttgctctgaatcctattttgatggtttcaataatattgactaggggttaaaaaagtaaacactgagagtagatttattcttttttttttttttttttttttttgagatggagtctcgctctgtcgcccaggctggagtgcagtggcgcagtctcggctcactgcaagctccgcctcccgggttcatgtcattctcctgcctcagcctcccgagtagttgggactacaggcgcccaccaccacgcccggctaattttttgtatttttagtagagacggggtttcaccatgttagccaggatggtctcgatctcctgacctcgtgatccacccacctcggcctcccaaagtgctgggattacaggcgtgagccaccgcgcccggcctagatttattcttttattgtgttcaaccaatcaggattttatgactaaaatactatcattagcattttagaaaatactgtattgttatagtgaattcattattaggaaaaacatgtcatgaataatctatttgcaattttaaactgataattgcaattaatttcccttacaagtagctctgctcgtgcccacaagactgtatataagacagttagtctcctgtaaagtcttaaaaacagaaaattgaacaggttagttggtagattgataccctctcactgccttctttttttggttaaaggtcctggtaaagttttaaaagctaagaaccattgaagcacagtagggcatgggaggaacccacacctgctgtgctcctggtgcccgtagttgggctggtcctctgtggcagggagggactcgctatggggttaggcctggaaaatgaggctccttctgtagccagtctctgaatggagcatttgaatgcaaagtgttagacacagccattgggggaataccaaatcccattaccaaaaaaagcatcttttactttatgtaaattgtagtgtcttaaaaaacatatggcttattataacatttctctgcgcataaaatttgcagacttatcagcttgatagaacataaaacaatgtagcacaaataaaattttgtctatgacagtgcttattcggaacttcattataatatcaatttaaaaaaaaaatctgatttttttgcctgaagctatgtgtctcttaaatggaagccattacttagacattatatgcaatatagaatctgtgccataaaattttgaaacattttagccattcacagatcatttattagggattgcttatcacatagatatatttaaataatatatgtatggaaaagatgtatatattgctataaatgaaagacaaattattgataaacaaaataaaaaatgtattcataaatttctgtcctgaaatggctcaggaagaataatttttaaaaatcgtacagctaaatttctgaaaggtagataggattatcgacatcattcactcctggacaatagatgagttcaaaagttgtagctgttagagaaggaggaacaagaaaaattagcctcatgcagtcagtaatcatttatgtgagaaaaaggatatagaaaagagtcacacaggacacattaatgtgagtctgtgagaaaaactgctaacatgtattaatactgggttaaaattttttgaaaaattttagactttatgatcacaacatattgtgatgtatacttagctaataaggcaaatcactgtagaacttaccagctacagtaacacgggaaaccgtaagtaactattttagagtaactataagtaattctaaaatgaatgaagagaatgaagtgactttttcagccttaagcaagcttataggatgactaatgatttccctgacagatggcatagaattggtttgggaatcaacacctatgtaaataaaaatgtcagccgaaaaatgagatggcacaacaaatcagtcctttcaaggaaacggtggaggcaaagaaaggcagaataattacatgagtggccgcaggggtggttaaggtggtgccatctgtcacagcagacctctgaccccaggtgggggagggtgtctcagaacggccagtggtgtcagagtcaccaatctgcagctcctccagcatggctgtggaggactcactctccgagcgggaggagtgctcggccagggaggagtctgttgtcagagagcctgtgtcgtggctgtggatgaggctttctggagctgggagcaggtgtttgtataagcaatgggaaaggctctggggattatgcaggcgtgaagaccccacaccatcggggggcggaaggctgagtgatgctgagctggtgccactgcctggtgagaaagtggctcggttcaaaggtaccacggaaggagggcacggaggagaagcttctggtgtggtttgtctgtgtgtctgtgaagcatttacctccaacacactggcaggtaagttctgatttccaagctgagtatgaggaaaaaataataagagataaattatccaattaacaaaagtacctctttttgcgatgtggcagagaaggcaaagcatcggttttatttgcaagcactttaaggagttacattcagatgggttaggtgccaaccacacagtgcagaaaaagtgtgaaaacaggaagaaagtgaatccagtcggtgtgttttgaaacaaggccggttttcacacagcactgcaatgtaattctggttaggggcttgagagtgttggcataacgaaactgtttcctcaggagttttagtttttgtatttgtgacaatgataagatatcagactatcggtcagcagaattggtttgtccttcactagaaaaatctaatagcataattgcctcccccttgccaaaatgtccccaaaacataaatctgtttgtcttattttttcctggtttatgaatctaaacactgataatactaaacacaactaagcagaaaagataaatggaaaagatgttttatttcctttccactaattaaatctgttctttgatttcactacaaaatacgaaaagaattggactttaaaatatcctagcaatgcaaatagaggtaccatgtgtgaaaatgaaaaccagccactgataatagttagaatgtaccctagttagttagaactatggttggcactaaatcttaggtaaaggagaaagaaactgaaggaaaaataaaagatttaacagctccaaggctatatatagcccaagaggctaaacatagcgaagggatgctctgtaggaggaagagagaagatgaccatttgaaattttacaaccacctgtggtagcctggatgacgtttgaccacacgtgacaaataggatgataagtactcaattcaacgtaagtgaataaaactccgaagcaacttttcttacttattttttctacctttcagaacagacactttttggaggggatgtttgggagaggaaatggttttaagatagatggccagaggtattgtgagatattagtacaaagatgggaatgaatgaaggagaactgtttacacttagaaatactgcctagtaaatgtttaagttaaacaatttggtgttctttggcagccataattttcataatgactgatgtcatgcacgttgttagcataataaaaaggttgcaataatttttttctcagacttttacttgaatacttttaaaaaatccatcatataaaaaggtctctctgaatcatagatcccttagaaatctgataaatgtgactgatccttcttttggggaaatgcacaaattcatacatacagaaagttctgcataaacttcagggggacagagacactctaaagcataaccttaatctaatgggttaagaaaccccaaccttggataaaaagacagattttcttgtcctaatcttacttaatatgattttttttcttgtttaaacatagtcattttaaatgtgatatatatatatatatatacgtatatatataatatatattttactgttcatggttgtttaaatctctagaaataactgacagaaatcttagttacccagaacttaaaatgttttggtggggatgcatccttattattactgagtgtttacaataattgcaatcttattggaggtgaaactttaatattatgaaattatcataattctaacttaatgtattaaaatgttgctataagtctgaatgtaattcagtataaagcagtctttggatagcgtcaatgaaatttcccctaataattcagctttactaaggatgtttccatgtaatacgaatctctttttagttttatttatgctaaatgaaaactatgaaataatacaaatcatacaaaaggatttgagttatctgctcatgagacttttccctttcaaattaaaagaaaaaaatctaatgactttaacccccattggactgacttgtccatatcctatgacttgaaacatgtcaaaagctaaagcgtattctaaaatcaccattgtcacgggtaatatgatcattagtttgcatagcactgtgtctggggatggtccttacccattcaattgttcttccaaatagaatgtccacagaaaacaaaattattccacctttcgaatttctttcaccacctcctgacatgctcctggttttgagtcttttaatgcacgtgtgtgtatgggtgtgtatgtgcgtgtgtgtgtttgtgagtgtaaggcatgaaatgcctcgtggtgagtcacatcacacttaaatttctacagataaaactcaataattcaacagttatactggtcacccacaaaaaagctttgacaagaccccaatcttcacatgaatggaatataccctgtagacccaaggggaaagaaagaccatgttacacgtgtttctcctgaggaaaatcagaagagcagcaggaaaggtatgaaaggggaagaaggcagtattttcccaatctggactacctcaaaaatagggaaaactggctttaaacaagtgtatttttttcttacttcatgagtggcaagtagatgactgcaggtaatcatcctaattgttttaggtctccttcttttcaagaccatggaaggctaaggtgtttgaatagggatcaagggtcaccaactttttgtgagtataaattgttttttctttccccaacccttgagctagcaggaagagggtaatgagaaacaccagctagcagccaggggctgcctggtcttctgcaaaggacagggacggtgcttaaaccttaatatgcttcatataccaagagagagcacctgcttactcaaactagcactgagcttcttcgtccaaatgactccaacccagaatgctaaagagagcctgtggatgagagtgctcaccaatcaacactggagctcctgaggaatgaaggggcacagagattcaagggagggtgagcttcagcagtggaaaaagtgtattgagttggatgaaggcattgcaaactcaagtgcccatcatgggtcaggaaagtatccaggatgtgcaaatcaagcccgtgttggatgacagggaatgatgggaccgatggcagaatgcggaagtcatgttccccctcaaggcgggcgtcattgacccatatcctttgccttgaaacacgatgaaaattaaagcttactgtctctaagaccaccatagtcatgggtaatatgacctttagttcgctcataagctcagtgacaacacatctatagtcataagcccctaagctgtcacttgctgacacagcagatgtggaagctggaggtggaagagggtagctgtggagcggggatgtgaagaaggagtgcatggccaggcctcaggagaggaggggaaagtgctcgttggggtgcaaaacttaaagagtgacaaaaaactcagtaattgagataaattctgtttcaatgcaatctttgaaagaaaatcaacatcaatgcaaaaaagcaaaaataccccatactgaacaaaaatgtcgaaaatataaatgaagaccagcgcatgccaagccataggaaaagagagtctgggtctggcgtttttaatgcaagaaaactcatcaataatattttcaaaatctacatttttgcttatttcagttttagttgagagaatagacatgtttgacaatttccaattaactgatggccatcttaaataatttgtaattaatttaaggtgaagtaaacatgtaatagggcaagcgcagtggctcacacctgtaatcccagcactttgggaggctgaggcgggcagatcacctgaggtcaggagttctagaccagcctggacaacatggtgaaaccccgtctctactaaaaatacaaaaattagccaggcgtgatggcaggtgcctgtaatcccagctactctggaggctgaggcaggagaattgcttgaacctgggaggtggaggttgcagtgggccgagatcacaccactgcactccagcctgggtgacagagcaagactctgtctcaaatttaaaaaaaaaaggtttattttgctttaaataaaatatttaagcttaaaataatgtgtgagtgttaataacgtgcgtttcaacttttcaaaaaaattctaatgacttaaacattctaggaaaaagctcattcccaatatatgaaaacaggtataaggaagcacagaatttccttccacctcaggttccagttggcttgacatggccctgaggtcaaggatcctaacatctctctcttaacacctttagtcattgagcttctaggcctcatttctcaaggaacataaggaatatatattaaatgtcaagcaaagaaatctgacaggcttttgttctcttttttccaatgatagtaatttacttgaaaagaaaatatctaggaaggggtttttttttttttggagtcttgctctcgacctccaaaagtgctgggattacaggcatgagccactgtgcccggctggaaggggttttaaaaaaaccaatctttacctcccatccacacatcctttagggaaaatgtgccccctcttttcatggcctgtcctggtggtatgaggagacctgcctggcagctgtgtctgttgccggatcatcattttgctggccacagctgattaggaagggggagtaactggactatgctgggccagtggggccctgcctccctcctgggaatttgaattacgtgacactgaatgcccctcaggtagctgtcgggtacccaaatgcaaggagtcagagagtatcatggaaacccatgggcaacttgaagtaacgacagagcagaaactaagagacagacagggaactatgcagttcctacgactgagaaggatggagggtagctgcctggccattgccccgtttccctaaggcctggctgtattgcctgcattgtaatgatgtgagattgtctgacagcctcataataaaaattattttaaccatatactccccacccaagagctgggtgacaagtgatctaaaattgtcacacagattgggcacactgacagcatgtggcatctgaatcaggggagtaaatatttctactgtactctgtggtattcagatcgggaatatggttttgcatctgggaaagtgtcatattttaagaacattatcaaaatatgggatttaaaaatcagcttgtgtgagagcatagaggtagcagaggctagtggctgagctgtggatcttgagtcagacagacttgggcaacttgtttaatttccttggcctcagttccttcatgtgtaaaatataggcatggataaaacccatctcttaaagcctgtaaaaattaagtagggcaatgtaaagtgcttagcacagtgcctggtgtgctgtaatagctctcaaaaaaaggagaatcatgttttacaaaattaaaatgctgggaaggaacaggaatgctctgcacaaagccagtagcagggtagggaagagaaggatcacgtgaacactgtcagatagaggcggaagaacattctgtctcttttgctctgtggataaccatgcagaagttaaggaaggcagatcatgacgtggtattagaaattctttccaataattcgatctcagaaatggccaagcactggactgctgccttggaatgtaactgagctcttcattaagtgtattcagaaaaggctggatgcccatctattgggagatgttgaagaggacgttttatttgtaaactcatgttggactcccaagtattctctaatgttcaattatttaaatacatgcatatgcatgcgcatgcacagacatcaaatggagaaattgccaaagacctgatcaactaatagcattacgagcccacagaaaggaagccatactaatggaagacatcaatgattggggccggtcttgatagcaatgttccagaaagtgcgttctgcagttctgcacctattatcccacactgctgacatgtctgcattactctgtcctccttagtatctacatactgatcccatggagcaaaagaaatgagtttcctctcccttctacatgacagtcgggcaagttcccctgtgagtccccagcatatgtgcagtggcagctgtgaaggtgaggctttggcaaatgattgattatgttatttcataacggacaggacaagcttatcttcctgaagcaaggaacatagcacagatgccatagaaactgtttgggggtgtagctttttgctggctttccaaagtgtctggcttataccttcacttacttgacattgagaacaatgtgacatttttagcaacaggatatctgatcacacagtgccataaggataacatgcctcatttctggtctgtttgtaggaggtcaattaaagcacatgccgtttagaaaacactatgaaaaattgtcaaatatgaagagaatttctaacagtgacctgtagttttcttcttaaattaatgagcagacattaataataacaaaactatgtaaataaaacttctgaaacactgaaatgtacttttcacatcttggtgtacttttatcgcttggacctgctaattcctgggagcctaattctttataatggagcacatatttggctgactcacagggtatagcttacagtgcttggcattggctgagacttgccagaatgcggagtgcaagtgtttaaaatggaaaggtcaccattgtgaaaggtcattacatggaaaatgagacttaaaaatgaagcatatcacaatcatcaagatgtagaaacaaaccaaatgtccattgatggacaaatagataaagacaacgtggtgtatacgcatactaggatactattcagccttaaaaaagatggatgtcctgccacatgctgtaacatggagcaatctggaggaccttataccaagtgaaggcctgtctcagaaggacaaatatctgagcagagagtagactggtggttgccaggcgcttggggaagggggatatgagttgctattcggtgggcataaagttttagttatgcaagatgaataaatcctagagatctgctgcactgcatggtgcctacagttaacaatactgcattgcacacttacaaatttgttaagaaggcagatctcatgttaaatgttcttaccaaaattttaaacagagaataaaaactgcaacagcttcatgctaccttttttaaaaagccttagaaaagaggacacgctatcttggaacaaactgaaagtctgttgaaataaacttttacctaccagtaaaaaaaatgaagtattgttgaaaataatatatttctttttcccaatcagatgcataatttggaaaaatattatttaatgatgatgacagctactgtatgttgaagaattaccatgaagcaggcaccatgccaagatccttatatgccttactcaaacctcccagcagttctatgaatggttgctatcattgtccctgttttatagatgagaaaactgctgctcggggagggtgaataactagatgaatggttttatgttaataagatcttgaaacagctgactgcccaaccactttcttcccagtctctctcatacccactccaagaaagcctccttccccactatggaatcaatggtaagttttcagatttcatttcaaacctgtctcatcaacagcatttgtgcggtgaaccatccctttctttccacacattttcctcacatggcttttaggatgccacattttcccagatttcctcctcccttagaggacactgctttcagtctcctccactgcttcttcctcttaatgttgagattcactcaggctcaactcttggtcctccccttttctctgtccttcccctgctgatctcactctgtctcatggccacaaaacccatcgactagccaatggctgatacctccaaccaggacctttcccctgaagtacaggctcttacatccaaatgctcacttgaccacttaatgtgggtgtctaagaaatgcctcaaacttcctgtttcccaaatggaacctctgaagtttccaccaacctgttccacccacagctgtccagtctcagctgatggcgatgctatcttccagttggagtcaaccttgacttttctcttcctcacatcccacatgcaatctgccaggaagtcctgtttgcttgactttcaaaatacattctcacagtctgatttctcaccacctcctctgctgccccctgctttgagccccatcatttcttacctaaaggactgcagtagttacctaactggtttgcctgatctcctccttgccccactatggtacgtttttcactgagctgccagaatgattttgttaaaatataagggaaataataatggtggtagcctcaacatcctccagtgacctccatttttattgagagtaaatgtcaaaatccttgcaatggcttataaggcctcctgtcatctggtctttgttacctctgacttcacttcctatcactctcacctcacttacttcctctccctccctcaggcttccttctggtcctcccacagccccagcatgatcaacctcaaagcctttacataagacattccctctgcctagaatattcttcctccttcaaagctgttctcttttcagtgaggtctattgatattgagttaccatacttgacatgatatctggtctccacatctctactttgcatggcataactcaatttccataatcttctaatatatgtaatttactccagttcttattaatgcttgctcctcctgccacacacagacaaattttaagcaggaatggtttcaaatccaactctgttactagaacagacttgacataggttaggcacccaataaatatttcttgaataaatagcagtgacaggatctcaaatcttaacttttagatggtgccgataccctggggataatataatcaaactaaccgtctctgcgcagcctggataaaaccatgcaaaacgaaaggtatcagcttgttttcaaacatcacaaaaccattctgaagaagcaaaccaggttggatgagtccaatgactgatatgtgttcctatgacttctcctacacctgcttcctggcgtgcccatcctgggacactggcgagtctgctcactgacactggcacgggcctgtctgtacagtcacagacggattttgctccctccgaccttcctggactcctgaacccgatcaagatgcatctgcctcagctcccaccatcatggcaccgtgtctcgtcactgctgagtaacgacttcacaacgagaagtagcactctttcagagtggtggccctgcagccagcctgccagggtgtgtattctgtttctgccttttgccagctgcatgaccctgggggagcaacttacttctgtgcctcagtttccttagccataaaataaggacagtagtaatacctactccatgagattgtggcaattattaataaacataaacaagctgcaacagtgcctgcatagagtaaggccttaatatttgttagctcctattaatgttattattattattatcatctgatttcataggtgctttcagaagatattaccttaattagaagaaattgctctactgaacgaattttgcacatcttgattggctgatggagaagatattttagtagaggtatgataataccagcttgtcctttaatcatttctgtttaaggctcgtctgctttatgagtgggtggggggatcttggtgtcaattagttatcttttggagattttctgtacagtttaaaagtatatctcctcgaggatatgttttggatgatctttattaacacagatacaaaaaggagtattatacaaattatttacttaggcaccactgttttcaatattaacactagcgctgttgctgctactattatatcttttattaacagctgtcattgagtgcttgctctagcctagtctatggtaattccctagtcttaccataacctataaattaagggttaattagtattctcatttctttgttcggactcacagaaaagtttagatgaatgtctcatcacatagtaaatgatgcctggattaaaatctacagcttatccttaaagtttgtgcttttagcactacattgttctatggagaagtcaaaaagagaagcacatttctcctgttaacagactaatacatgtaaacagaaggatgctatgagagaattctacacacatggaaagttttacttcctgaaagtctggataataaaagttggctaatacactttctgaaatgataaattaagttttagtgaaaatgaatattgagttgcaaagaaatagacattgcttaaaattaagataactattccctgccaaagcaaattataattgacaattatctgaagaggttttacacatgtaaataaagtaaatctaagtgcaaaaagatctaatatgaaaaatatttctttgaaacctaaacatgctttaagtcctgaagtagtctgcaatgtcttaaatgataactgacccctcaatgatttcccataaacatctagaagaaaaaaaaaaatttagaacatgatttctggatgaaagatctgtatatgcatatttacatttaaaaatacctagacatttgctgatgaatttagtagggttttaaattggaaaatggtttctttctcctttcccttcctgcttggaaactaagaaagcattaggtcatataagaagcccaaaccaaaggagttagggtctctacgatacgcatgtattaatacgaagagactgagaagcttaaggtaccactctgcagtctgaggactgagaggccgctgcaactgcagatttttgtctctcttgctgaagaggtatctttgcagtctctggagaaagctcaggtagctgtttgtggctttcaagatcctgtcctgaaaggggagctatctgaatggaaagagatgctgtgtgtgtctcaggcactggattaggggtcagtgagcggggccttttgagaaatgacggtacttcgacagatttggagaactgtggagtactaatggggctgctacttcctagatcctggttatgggttagtttcaaggtagaaatcctccgagtttgagaatcttgcctgtagtcctcttgtagaactggggtgttgatgttagcgaatggtgcaggatccgtgctggaagctgctggtagtggattagtgattttttgtgtatatgacatggttgtgttagattcttcagaatatacaattgtctgtctcgaatcttcattggaatacatagttccctgaagaggttttttgttagcaaagtactctgtactggagggaatttgtgtgttagttactaactggtctaaaatgacaccctttgtgtgactggttatcaaagagctatgaaagctctcttttctttctggtggagggggtgcctggattgacaatgggatccagagaaagaaataaagttgaaagaaaaacagagaaagtccaagttagtcatgaaagaaaccagtgtcaaccttgcctttacagaagtaaagcaatgccacaccttctgattatgctatccattttgttagctagattgagtgatcattttcattccatttagaatgcacttatgtttattatcaatgtttgcccttggggaaaaaagtgttgccagagaatacattataacatttgctccatctacattcagggaaattatgttaaaagtgaacatatgttctcttggcatattttattagactttgacatatatatatatagtttatttaatagcattgttttataacaattttcatgcttgtggcacaattttactaatatctccaacacagagcccttttagttaatataatagttgcatactcatagttattgaatacataatgtattgctgacctcatcagtttaaatccaaagcatcagctgtcagcttttaaagaattagaatatatcctagagattatgttaaaaaccgacatactttgataagcttaatcagaaacaaaaccaaaccaaacccttgtttgttaaaatttgttctccatgttgtaaatacaaacctggcaagcaaactaaatacaaaagcaaaaacatattaaaaataaaacgtattgaaatacgcacattaggaaagaggctgtaagcagtggtctaataatcatgccttaaaataatgcagtagccaagagtgtgcagggttacctgagttggtgatcttttatcttgtaggtttggtcgaacgcttctaaaaccttttgctgcaagagaggaatatgtagcatctccgttcagtgtctcctgattgccatcattgtaagatctccaagctttcattaagggaaaacaattggatacaaaaatatctacgttcacttaaacattttttataaaatttatttttatttccaaaatcatttttatttccaaaattgtagtgttcttactagaggtttaatttaatatgcataacagtacatgaaatttaaatttaacatgaagtcagcgatgtggctatgaatatgttttctaaaagtcacaaataatataataattattcagaatattttttctgtacctgagtctggtgactgagaatcacgccctgaaagaaaaaaaaatgttgaaattaagactaaggtgaaataaatgaacaacccagtaaaaataacatggcaaagaactatatgcattgtttttgcaaacattatttcagttttaaaatctgggtatgtcaaacatgccaaagggaggcttgtacatttatttttacttcaattagaatgtcattcattaaatatctataatatataaatatctatatagtaaacactcatttttcccctcaataatgttgcaacatgcaattttaatcttattatggcaaagatgaatatatgaatttctaaatatcaaattaaaggatcaaaagagatctggtttataaacagcactaactcaaactgccagatccttagcttccaatgccctgctgttgataagcatatttaactcctgtgttacagaactgtattctgtagttcgcatttttttttaccttaagaaactgtagacctgtctaccatatcatgtgacattttcaaattattctcgagactgagtttttttcctattgcaatataaaagtcattttatactcaaatatgaaaaaactgttacaacatgttccactgtctttcagctagtaagctgtggaaaataaatttcaggactaataaattgcttttggtaaggcagttggcaagttatcagtgatatatttgttatcaattttattgaagttatatattccaaaatcttctatatgcacatttgaggtaatcagtttgcacgtttaactcatgtgtattttaagtcatcagcttgtgttgcctggtttattaaagcacatggtcaactttacttagattcattaagctttaactttggaggtgatcctaggggttggatcattagcccaacctgctgtccagtcctggattccttctacgtgttccccaggaccattattagattcccatttcaattcataaaacaggaattttacatgctggaaaagtctttgtttttcttttagtgcttcagcacagttattttcaagtttaaacacatgaacttagaatgataaaaatgggctgagaaatgcgagcatctgatttttagataaaatatttgatatgggttctttccaaatcaaaggaaggaacacaaatgtgagtcagcacagagtacattagaatgattccagctcaggtgagctagagaagactaatgaattcccattctttatgatcattgataacttggtatggattttatctccaatgaatttaaaattggagtaataaaatgggtaccatagagaaaaattactttgaagaattatgcatgaaatgtttattggaccctacttctagaatttgtacaattttttgatttttattttattttttaaagatggggtcttgctattttgtccaggctgtccttgaaatagtgggctcaagagatcctacagcctcagtctgttggttagctgggactacaggtatgtgccactgggcctggcccttcttctaggatttgatggaagcagaaatgattgaaattcttaatcagctatatgatgaagataaagaaaaatacagtttgacaaaaaatacagagcaatcatcagaatgctgctttagggcactcaggagagagatttaataaccatgaggctgccatccactgtggacaatgaacaaattttgggatttgggaaaggacaacgaaaagcaaattttggaatttgggaaaaagcaataaaatagcccaatgctactttatgaaaagagaagcagcattaataacaatgattatattctgatttttttcttgaggatagggagtttcttttatgcttggtttggtaaaactgagataaaaaagaaggctgtgtgttagcgctggggacgaggtaatgggacccagaggcttggaggtgcaagggtgcaggtgcggtgagaaagaagaaggtgtactgggcgggtctgaaggacactagaaataaactccctctaaatgatagtctgtagggggcaggctctgtttcttcacgctggtcaccgtgttgaagatgaggagccccaggagacggtaagtgtgagaatcagaggacagtcactccaggctcaactgtgggtttcttcctgggacactgggcccagggatttccaaatgaatctgtccctgtgccactggaaacattagacagtaagaggggtgggctgttctgaagggtcttgcatcgcacagtggacacgagtgtgcagaattaagagaaaggagaaaatggccattgagtcgaacttcaggatgaaccagtattttaataaagcttatgttgatgattaaagtctgccttgaagtggctggtctctcaaggagactaaagtacattcatttctctttctttaaaataaatccaattacagatacttggaacacccagtcctgatttgctcttttattatagtcttctatgtggacactttttagcatagccctgcttttattttatccctgcaggaaagactaggagagggaggacacctgttctttggagcaggtaatagaaagtatcatggatccacatcaagtaaagagaatataggttagaaaaaaaaaaaaaagtcgcccaggtaaatggcttggcagatgtgtggggaaaatggatttccccagatctgcagcattattggtgcacattcacttgtgaaaaaaacacaaagctaggactaggggccagagtccttaatttctagtgttctttagtagacagtcactgcttcactgaaaatccacgaatgactaaatggtgtaagttttcccctttcctggctgttttgcatgtgaatattttaacaaatagggtcttgaagaatgaagagctccacgtgctcttaccagcccttttccttgtgtcgaggcacaaactggtgagtctctgtctgagattttgtgcaagacattcccggttccatgtcaggggtggaactggatgccctccatggccctttccactgttatcattctaacatgacagctttcgtgtagctgtgtttgtgatacgtgtcacatcgtaatctctactctcaggttttatttaaatcccttttaactgatatgctctattgacactatcactatatttttcttgaaaattattattttgatgcctataactcatttctttagaagactcaagtgctttttaagaattattttaaaatgttgattaaattcaggtcaactaattgagtgcctactgtgtttctatgtacaattataacccttttcatttattttcttcatttattctcatttattctgacaaatccttgtgagtctgggaaacgattaagctttcagagaggtaagaaatgacaaacaatttttcattggaaagaaaggaaatgagatctagacagactaattttcttaagggcatgaaacatgcaggtggtatcgacaagaccctgtctcttggcggagtggtccccatactgcggcattcctttaggctgacaaggggttttggtgaaataaaatgttttcaattgtttctcaatagtcattgtcttggttttggcataggtttaaaatatccgtgtgtgctctgatggattgtccagtgggaatttacttcttataaaaggaaaagagaaagacagactgactcaggggacaaataggtggtgactcagattgactgtctgatcagagaagggagtgaaaatggcttgggaccttttctggaggttttacataaaggctgttgtattttaacaatatcgaaggcaataaatatttatcaattcccttttgattcacatatagacactgtatcatataagttcttatgaaagctacatagaatgcagttgtgcatattaatgctaacttctttattcaaaaatataatggaagcttctttgaaaaagggggccaggtgtagtggctcaggcctgtaatcccagcactttcggaggctgaggcgggcggatcacttgaggtcaggagtttgagaccagcctggccaacatggtgaaaccaggtctctactaaaaaaaatacaaaaattagccaggcatggtggcaggcacctgtaatcgcagctactcaggagcctaaggcaggagaatgcttgaacctgggaggcagaggttgcagtgagccaagatcgtgccacagcactgcagcctgggcacagagcaagacccacccgtctcaaaaaaaaaaaaaaagaaaagaaaagaaaaagaaaaagggatcttactttacgtctaattgacacaaaagagggctgtttttaaacaattatgtccaaaattcagtggacttcattctctagaaatcatatgcctagtgatagaaaacttaaaatagcccaaagctacattgttattactgaagattatttcatattcctaaagtgtgaaatgttttttttttcttttttgctgttgtaattccgaagcattaaatcttttctatgaagtcgagttatatgaaattgcatgtagttcagtttcgactctccacatgggcactgtggaagcagtgtggcgttccctggtacgtgcgtcaaggttcacgtctgagtaggttggactgagatcctatttggttgaaatgtcaatgacattcagggtattggcattccaattacacgatggccctgaactcttacggttattgtcttacttgccttcattcctgtttctcatggtatccaaggtaaatacatctgtagtttttctaacacctttttatgttcatacgtgcatgagccactacatacaaatagagatttgtatagagatttttttttaaccaaaatgaggtcatactataaaccttgcaatgcatcttgcattttcttttaacttaatatataactgaactcactagcctggcatttaaacttggacgttgaaatccatttgtggattagaggtggtgaacggaagtgggattctgcatatggaagttcatttttttttctcaagaaaaactcagtagtttagaattaagtggctgtaaagcgaagaacaccctgagtatttaatcaacttctagatgtatgtgtgtagaagactgtgatatgcataatgagaattaaaattatttaaagatgccccatccctttctcacttctgctgtaagacccattaatcttataaataaaaaacaagcagtccccaaactgcagctaaccaaccagccaaccaaccaaccaacccaccaaccaacccatcaccaacaggtgtgggtctatttcagggtctggaggcactgggcttgctggcctccctttgaccttctaacagctgcaccccctcccagtgcagactgtgccttaggtactgtgcctaacttcggtactgtggcttaggtagtcacaacagagatttattaaaaagagaccacctgagtggatgctgaaatctcgcacccccagtgacttcctatctgtgggtacatgtgaatcttaattggtcaagattttggtatgtttaaatatatatagtagaagggtatttgctgattggattaaaggaaagcaaaggtctctttcaaaactaatgttctatcattctgttcacaacctttgacaaagaatccagttaatgaagattcagtttcctacaaatcccttttttcatcctgtacccctgtacccctaccccaaaagtttttaggttaaaaaaaaaaaccccaaaacctctgagttatcttaatgaaatattatgctacttaagttcatgagataacaaaaacgtgaatagttattaacactcgcagttactcaacctatttttggcaagtgactgctgtttttaattacacatttaaaatgtttcctacaagatctcattttcctttgctttttacgtttagaacaaaaacagtcagaagagctagaagccattcaagtgcgacattgtgtgagttagtgatattatacctgcagccaataggtttggagaactttgcactctcttcacagatgttagcgtaacagacatggcggcacgtttgcgagcacacccaccgctatctggaagcaaaaaaatgatatagcagaggccaaggcaacgggaaaagcacgtgcaatatcatgcgttttaagagaaatgtgccagacatccatgagaaagatgaacagttagaattagtaatcatggaatgcacctgccaatttcacaccaccctcaaactaaaacaaacaaaacgaaacaaaacaaaagaagaccagggatctgtcttagaaataggtatcactgttttagtgaaagcatggaagacttaatacttaacattttatggttttctttgtgaaaactcaggcacagaactcaactttgtttataccatttaaattcaatttatactaaatctataagcactggatctggcttttagagtcaaggattagctccatgtcaggattaaaggctatggtacaacatacttttaagttaatatcatttaagttttaccatcttctagctgttataattcccaaagagagcttgaataattcttgcagtaaaaattattagtgacacaggtatgatacatttttttaggattcatagaggaacacatggcatcatggaaagtccactcttcctgtagttagtgttagttatgcaaataactagccttattaaaataaaagtattgatatatatggtatcgaaatgaccatgtttaaagaaaggagtatattgcttttactttttaaatttttatttttagggccggagtcttgctccatcacccaggctggagtgcagtggtaccatcacagctcattgccatctcaacctcctgcgctcaagcaatcctcctgcctcagtctcctgagtagctaggaccacaggcacacaccggctaacgttttaactttttgtagagatgtggtcttgctgtgttccccaggctggtctcaaactccctggctcaagggctctttccgcctcggcctcccattacaagcatgagccaccgcacctggcctcatttattgcttttatacttttaacaatatgtgtactatgattcatatctttaaacttatgcaagtcataatgtgaaataaaatcagtgtaagttcatcagccattttaatgtgctatgagaagtttagacttctaaatttggaagagaagtcttttaaaattggaaggccaatgttctatttatgaccagattcaaattccattcttacattcctctgtaatatggcatggcaataaatagttttgctcattctcctcattctgcttattgagtaaaaccaaattaaattaaatctttttgaaagttataaaaaaagacaatataaccaccgatataataatataatcattatatattgtcacatttccatttttcctttttctttattttcataaggaaagtatcaagtttgtttattggacatgacagaatttagattggtaaagatgctcggaagtataatttgaaggaatttttcataaaatttataaatagtaagattaatagaacttaaaagcagtggagtgattcttacttcacttttttaaagtatatgtttaaagtaacaatttcttaatgtagaaaatcattaaaccagaaaaccaacttgaaagaatattaaaagaaaatgaaccaaataaatcaaaggttataattaagaacccaaagaaagtgacacaaatgggagaaacaactgaagattccttcaggaaaggctccaaaaggattttagcgaactcagcaaactgaaagtgcttagagacaagtgcgtctgataagatggaggtgatgttattgcttccaggagctggaaactggttgaaatggttgtgtagtcaaaggtgttgaaagtaaaaactgacatcactctaagagtgattttatttcctagttctgttaattctgaacatctcacaagcacataggtgaaaagagaaaattccagaatgagaagatccagggtcacaggttaaatctctggtgttcaaactgtgggctgcgatgccctgggctgcactggtgcattcatgagggtgttggggggtagttcctgtttttaaggaaaacacagtgctaactgttggacactcaatgaactacttgcttggggcagtgcctggtttcaacataatagacgcgctatattccttttgatgacatcatattttggaaaaactgggattttgatacttgctatgataaaaagcaagtaccatctgaagaacattttatttatttatgtttagagacagggtcttgctctgttgcccaggctggagtgtagtgatgcatttggaccttactgggctcaaactgatcctcctacctcagcttccctcatagctgggattacaggcacatgccaccacgcccagctaatttttaaaatttttacagggatagggtctcactatgttgcccaggcttgtctccaacacctggggtcaagcgatcctcctggctcagcctcccaaaatgctggaattacaggcgtgagccaccgtgactgtctggcctgtaaatcattttagatcagtaaatgagagtggtcatgtacaatcgaattctaaggtctgagaaatttttcagtgtgcaacaggcacacacataatattagtaagtaattcttgttataaagaaagaaataaaactattttctttcaatttatgtgtactgttctgtcaaatggcttctaagttgttagaacaaagtatttataaagtaattattaagttattaagttgttagcacctaactacttaataaatagaagtgttacatatttttgacctaggagcacagtgaagaaattactgagacattaaaggtcactgtaaaacaagaaagtttgggaatccttgggttagacaatttatgtattttaggaagctctaagtcttagatgaaataaatggaggctctgtctttaataaagtttaataaagggctgaattctaaaacttgaggcatttgtaaaattgctggaacagaatgatctattatattgtgtttctacttccttttgtattgatactttctgatactccttgaagatatttttaagatcttaaaacaaggatgctacctttcatgtgtcagtttatcctaaagaatcctaacgctggtcttgccttttgtcctcattaatgacctgcagccttgctaggctactcttcccctgagctgcaagattcctggaagctgttcctactgctggaaacccctcatatgggtaaattatagatggataattatttgatgtctttccttctctcctttcttcaatagctaagatatgcctaagaaagtaatgtgttaaacattctaaaagtggacatataacatgttttgtatatattttctacattgtttagacactttagtatgaaaaattaaccacattccccatggctagtttattatgcactgattaaaagcaaatacttaacttaaaagaatgctttttagccgtggtgaccaacacatgaagatttaaataggaatatatatttttaatgattgatatattggatagatatatctatcaataaagagatatattcctgtttaaatgaatattgatatatatatcaataaaactggcctgtattatttatctatatagattatctgcattgtctatccatatattatctgcattatctatctgtctattgatagatagataaatagatagatagatagatagatagatagacaaaaaagtcagaagagctagaagctattttggggatgagaaaaataacttgtggggccactttattcatctatctatctatctatcatcatctgtctatctgtagatagataatgcaggccagttttattgactagctctttaggaacaaattcctacttcattttgtaaacacagtaacaatgctttcaaattcctaaggcaatatatgtgtgtatatatatacatatatatttaaaagtggtatgtttttataaaaacattataattattattttggaattttgagcaaaagttttcagtcacttttgatcaattttatgcatatgtttgaataccatattttccaatcattatacattaagtggaagttcatccaaataagcaaaataatcctatacaaattgcatcccatccagagtcaagcttactccttagaaatgagaagatgctttagaaggttacatttatgctgctaagcagtaacttgggtcaagtaccttagtgacttaaacaaatttacaaatttgtatgtgcttattttgctatgagggattgaattatatgaataggaaggttaattattgagtgtactgcccatcaacacagcatattcagtatatcatgtatgcatatccctgtcataatagtgttataataaataggaaaatcagcactcagtaaaatgaggaatactgggagttatgatccacttaagtctacagggaaatgtcttggaaggatcaggaaatatcacttcctcatgtggaacttctgctggagtgactttgtagctccaaaacatggctgatgctagtccagctgtgggctctacattctatttgctttcttctgtctcctttacctgctaatattttctacttcattccccatgtctacttctgacatctccaatcatcaagttgcctttgtgtggtgcatatgcagggttataacttctcttgattgctgagccttccttgtgtgttttgactgtctccagtatcctcatcttgcctgttgtccacatgtctgcaaggtgactgcatccccaggagcccgcccgcacagccttctctgaggccactacggcacatggcacatgacgcaaggctctgcactcgacctggggattaggtattggtcctcgccagtggctgggtaatcctccttgtagcacttgatgcaacaagagacctcaaaaaggcaaccagctggacatgagagaatatcttgggccatcctttctactctgccatggcgcgacggctcaaacaactttccagtgatcacttgtggataggaaatggtatcgtttaaacacaagttacaaaatttcaacgagaaagttgtttcttgaattactttgtattgtatatttcaaggtggggggaaggcaaaattataagccaaattatttctactgtggaaaaaagttcatatgtacaaagcatgtatcatgaacacttttacagttaaaatgtagacaatacagtttagagacacagttgttaagttatttggagatactactctcacatctacacatataatgcttataacactatgggaattgtgactataggttaattaagctgattttgtataaaactttggcactctatctgctgacttcttcaacataaagagtttatagaacaggtaagtttgaatattttcttctagagcaacttgcctttgaatttagcctatttttaagtgagagatttcaaaagtacacaaacaaacgacatactacctcttcctattgtttataggagttagttttaacatgtgattagagaaaaagggagtaggagcaagtaatagaagagaaaattctatgtttggtggctataagagtggggcacaaatacaaagaaagaaagtaatgaatctatgctatgtatctaatcagaaactcagaatcacatttaggatcagaagagtgctaaactaatgatttagggccaacatgatttttagagagcaaggctaaaagagtttaaaactaacagacagcatacctgtgttcattttcaccttggagagtttgttattaaagtcttcagttttcctgtaggaaaaaaatggtgcataattgttcactagcatgtggaagaaaatatcatgaaagtgtgtcgcatttttgtttttgatgtacctgtaagttaatatcacattatcattagtcttatttaaatcagtgtttaataaggtaggaagaatttataattctgttcatgttaaactttaattattggtcccatgctcataaaacagacatattctgtttttatgcttttgtttaatggtgagcattaatggatgaaaatggagacgttttgtgcttgtttttctttttttctttctttttttttttgagacagagtccgccactgtcgcccaggccacagtgtagtggtgcgatcttggctcactgcaatctctgcctcctgggttcaagcgattcccctgcctcagcctcccaagtagctgggattacaggcacatgccaccacacccagctaatttttttctatttttaatagagacggggtttcactatgttggtcaggctactcttgaactcctgacgtcgtgatccacctgattcggcctcccagagtgctgggattacaggcgtgagccaccgtgcccggcctgtttgtttcttttttagagagagggttgtgctctgttacccaggctggagtgcagttggtgtgattgtagttcactgtggccttaatttcccgggctcaagccatcctcccacctcagcctctcaaggtgctgggattacaggtgtgaactaccgtgcctggttgagttttccttttaaaaaattaaatttcttttacaaatatttatacaaatggtttttgttctctaagcctgaaatgattgcctgttaagtgtcctcttccagagttttaaaagtgaccctggcactttaaaatcattgccttacatgtgcaggtcagttgactaccggggaatatgtaatgaatgtaacgcatattttcaggacactgtcaagaaagatgagattcatctttctcttttttaaagacacaggaaatagatggtcactacaaaatccatctctgcattagtattgaatgctgatttttcccagtgaaatgttggatgcaaagcaattgagattaattcgctagaaacggttggcagaaaggggttgtctcagaaaaaagtttttttttttgagatgagtctcgctctgtcgcccaggctggagtgcagtggtgcgatctcggctcactgcaagctctgcctcccgggctcacgccattcttctgcctcagcctcccaagtagctgggactacaggcacccgccaccacgctcggataatttctttttgcatttttagtagagacagggtttcaccatgttagccaggatggctacgatctcctgaccttgtgatccgcccgcctcggcctcccaaagaaaaaggttttaaatattgtgtatcgttttatgacatgtgagatgacttagttctttctctggcatattctcttagcccatttatggagtttcttatttacccataccctgaaaccaaagaggaaagacacgctgataaggtagcaaatctcctaagtccaagagctccctgcaagagctgtctgaccccggccacttggcctttgctcctgagtgggcctgttgttgagtatccacaagaacccccccgcacagcacaacacactcacagcttccaggcgcatcagtactgcaacatccgaacattttcaagaattttatttattccttttggatgaatgaggataaatttgaaatgaaatcattggcatgatcacctgtcaagaaagacttttgataaataaagattttttagtctctaaaaagagcagcaaatgagcttcctggctttcttgcctttgtctgccaaggttctcaccctcttctcccttctgaccatttcctctgctcaactcacaactattattttctttcaatgtggctattggagttcacctcttttggaaagcctggctttgttcattactgatgaaaaattataataataaaatcaaaatgtgaatattagctaaatataatggtacttctctcccagtggggggaaaatgatgaaagaaaataacattaaaaatacacttaagtcctatgaaatataattataaagcaagattttatatatagatatatatgtatagtgtaatcctcgttttgctatatacacatgtatatgtgcacacatacacacacacacgtatatttgcctagattgaattactaataccttaggactcaataaatgctaaattaatgaacatttaaaataggtaaaatcacagtactgataatcacctcagtatatgtttttagagctctacgctgaaaacaatatagacgatatccttactatatggtgtttaatttttgtgtggtctgtgttcagtgtcatatcgttgtccgtctgccctgggcatcattgcagtgtagggagcagggcaggagccatgcttagcgtggccaggctagaactgagtttccacagggttatggggaacttcactggggcatttcataggccaacagactctgaaaaatgattgagggaaattttatgatggtgaattttatctcctatttttcagtgtatgcaactaaacaggcacatttctgttttacttttttgttttgttcttctccagaattacacagaaaaaatgtggcgtatttctaaaaactcagcttggtagccttaagaccgcctgtattgagggataccgatgaagtcagggaagagggcagcggccagcacaggagctttgggaaagctccttcaaacgtatttagtttaatctctcggtagctcttggtagcaaaactcctaatatgttaaccttaaatggacaaaataaatggaaaagaaaagcctcaggggatgtctgtgactgagactgaggcaacttctaaaacaagaagggataaacaacctccagaaaatgaggattatgaggacctttcccaaattcgacttcttcattccttttgaaaccaggcaacgctgtgcttacaactgcttaaggttttaaaacggaatgaggaagacagtattcgggctagaataatagtgattgacaaagaaaacatcaaatacagaaggttaactctcagaatacaaaatctgctgacagacaataataatgtttttgtaccaagttagagaactagttatcaacacctattgtttgaattcaaatgccgatatttacagaatatctaacactcaaaaagtaaaataggattaacgagaacaaagaaaggcgccacaaatccttgaggttttcatctttaaagtgatgtatcctgttacttataaatgtaatttgtgaggctttttaacttcccattgttttagatgtcaaaatgtgaaatgactaacttcctaatcaagcaagacattttccaagtcgttaaaagaagaatcccagtgattgagctctcaagaagaacctgaaaccgaaaggcttcttgggtgactaataaaaatgcacgattctatttcccttatttgtgctaagtccattaacaaatccacgactgagaactctctttagacagttcaaactaaagcgaatctaatctcttttgttctgctctgaaaaagtgtccttgattgtacttacataacaagcacagattattctggaaagcatcaaattcctagagtctttgcatgctgctagacaacagcatctcaagtattctcttaacttggaattgaaccagggacgagactatgagaactgaccataacatggagactaccttgagccttagcagacaatccacggagcaaagaagtctccgaacatgaaggtgtcagcatgattttcaataggtgctaggggattgtgtttacttttgtcaaagtttcatataaaaagcaacttcatatgtgtcctaatttgtgacaacaatggattggttttacttatggattagagtagcctccactgtcaaaatacatatggcaatagattgtgttgattgttcatggaagggctgtaaacagcatgacttcgggtctatagtcttttaattttgcttgaatttcttttttttctttttctttttccttttctttcttttcttttcttttttttgagacggagtctcactctgccgcccaggctagagggcagtggcatgatctcggctcactacaacctccacctcctgggttcaaaggattctcctgcctcagccttctgagtagctggaattacaggcgtgcaccatcacgcctggctaatttttgtatttttagtagagacggggttttaccatgttggtcaggctggtctcaaactcctgaccttgtgatcctcccgcctcagcctcccaaagtgctgggattacagatgtgagccaccacgcctggccaattctgcttgaatttctttggattatcagacatctcatttttctcggaatcagagcaggctgtgttctcaatacgtataagagaatagaatgggtaatttaacttttgaaagaggatcctaaggagtttgatcctgcatgggcatgaacatgcctttgtgcctgttgtctcataattctgcttgaattgttttgattatcaggcatcccattctgaagagcagcagagacaaaatcctttccccagttttggctaagaattctatgtaggtcattttatttttgtagacctgaatttaagcaccaagaccatgtatgaaactacaggactgaattttagctcagttaatgggaggagttgcccaaaagattttccacagacgaaccttaagccaatacattgctactgttattttgaaattaacatattcacagttcatatattattcaaaaaaggacatattgatgtttaagtagtaggaaaacattgcaggatgttagtttttttttttaaagagatgtattttaaacatgaacataaaaatacaatcatattaaggttatgcaccagattttaacttgaatttacttatttattttgaaatgggatcatttgtagcactctctttggataaactgccctaagtgatcaatgtattaatgcatctctctctatctctgactgtggtaaaataagaagtattcataaatgccaagtgatttcacttttctattatagtcaaatgacttaattcaggttgacatttatcttcacctatctttcctatatgtcaacatgctgctttgaaatagtcacatgaaaactccaagtagtttgttttgtgagtttagaaactctcttctgactagtttctctaaattggctcagagactcctctgcctgagtgggtggcacacaagtcaacagtagcggcatgactgtccatgctcataagaacaccaagtacctcccagaactcctgtgctaacagtgcctgaaaatgttccttattattcaggagccgaattacccgcggcatctatttatctatgctgaggccagaacacattcaacatcatttctaggaataaggagacattattaccacaaataataaagaaataaatgaacatgaggccgttgataattttttatgagaatacgcggagtgttagttttaattagaccaaatgtcctgatatttggaaaaatttcctgaaaaaagagcactatatgtcttccaaggaaactagcaattttccttttgagactttacaatgtaagctgttcaaaatacttatcaattttccctaaagactttactgattagaagttgatcacctggtaaatgattccttctgatgttattccaaggtctcaaagttggtgaatcactcatttcactatttgctttaaatggtcatgtgacttaacattggtccagcaccttactttcttttttttctttaggtggaatctcactctgttgcccaggctggagtgcaatgatgcgatcttgcccactgcaacctctgcctcccggggtcaagtgattctcctgcctcagcctcccgagtagctgggattacaggcatgcaccaccatgccgtatttttagtagagacagggtttcaccatgttggccaggctggtctcgaactcctgacctcaagtgatccacccgcctcggcctcccaaagtgctaggattacaggtgtgagtcactgtgcctagccaccctactttcatggagttccttagttttatattgtaatcttagggatcattacggaacaacatctaagtattttcaagtgcatcttttttctaagactaagtcatttgttcaacttgatagtacagtattaggagaattccattggcttataatgtgcaaatcaaaagccaaaaaaatttctaatgaaaataattcagattctgactgaggatctcataagtcaggcaccttatcaaagagacatgtgaggaattaattagaatatccctataacacatgtataggcaaactgaatagcgttggaagaatgggtcaagaaataggcaaagcttgactcaaatcccagttctgcccatttctatgcatccgaacaatttataccaatgtcattatcatcgactcccccgctagacagcaaagcatccccaatctggcaaactggcattattcccattcactaatatttcaaatattttgaagcagatctttacctttgattgagtcttaagaagataatctagactttcctgaaaatacatggggcattattgtattgctttagattgaagcaagccatatggtttattagactgatttctatggattttcccgtctcccaattgtcccacacccagcttagcaacatgttggaattgaaaaggaattctactttccaggcagctttctttcttccttaaaaagatcctttatttagctaagattttcccccccacacattgccatgaacaagagaaaacctaagaaaatagttgaatcaaacccttgccttctagcccagctatagacaatgctactggatctaagggaaagtgacactataaaggttttgacgattagcttttttaaaaaaatcattctctttccctttgacagctgatagccgaaagcgatggctgaatggaaagagatgtctataaaatgtcacataacaaattgtgtgacaaattgcagagtgataacatcctgatggcagcctactcctgcttaattcaataagggaaagtgcctctgatttcccaccttgtactgagaagcacacatttctattttgaggagaaaagccttgatctttttaaagaaccattttttaaaattttatgctttgctaagtttctcactgcttttaattttaaaatcttccgttttaatttttatatattgaaatataaaaatcatctgatatcaaaagaattatgtaatctagtctagttttgcatgtctcatacttagactttaagtagaagcaagcatcaaaggctctggtagggattgagatcaaccaactcatttttagggttagacatttgaggataagataaatggatgccccaagcagatactcaaaagtagttcatctctcctgactcctagcaaataataggcatcctcctttaaggaatcttaaaacgtcatttgaaatcaagatcttggccaggcgcagtggctcacgcctgtaatcccagcactttgggaggccgaggcaggagggtcacttgaggtcaggagttcgagaccagcctggccaacatgacgaaacccctgcctctactaaaattcaaaaattagccgggcatggtggcacatgcctgtagtcccagctacgtgggaggctgaggcaggagaatggcttgaagctgggaggtggaggttgcagtgagtcgaaggttgcagtgagccgagatcgcaccattgcactccagcctgggtgacagagcaagactccatctcaaaaaaatgaaacaaaacaaaacaaaacacaaaacagaaaaacaacataggaaatcaagctctttccctttaaaatattacagtaccctgcttaattaagtactgaatcatatgaggcaggggttagggaaaagaacaaaatatgagaagacggtgtggtagaaggcaaaactgtttgataaataaaataagaactgttaacatagaaccatatgtttcttcctctaagactaataggaaaacagtggttgattatgacaaggattccttttgcccaatcacagcacaagtccaaatggaaagtgttaatcaggtctactaaacccaaagcatattagacctccttggtctaagcctagaccaatagccattgattttttttttctgaaatccttagaattttcagttagtaagtatatctattttaaattattttcatggtaatgttacgtggtgaaagtattacagtgaaataagcctgcttattgttaattcactgttcttaaaaagccacacttttcttctgattgaatacacctgtttcctgagcacctgaaataacatttatatactttagcaatgtcaaggtttgtcagaatttttgacagaatatactgtcagaattattacaaattcatgtttatatgtgtctcagatatgcaatggtgaaatcccacttgctatgtggaatttaaattttggggcaggggaaaatttgctctaatttgatcttatagtcttaaaatttaagtaatacattacttacaaagtttatccagaatgaaatgtaccttttttttttttttttttttgagacagagtctcgctctgttggccagggtggagtgcagtggtgcaatctcggctcaccgcagcctccacctcccaggttcgagcaattctcctgcctcatcctgcagagtagctggggttaccggtgtgtgccatcatgccaggctaattgtagtatttttagtagaaatggggtttcaccatgttggccacactggtctcgaactcttgacctcaggtaatctgcccgccttggtctcccaaagtgctgggattatgggtgtgagcctccatgcctggccagaatgtatcttaaattgtacatcttaaggcagtttgattcattttagaaaatttgaacgagaaaataataagccaatggaggaaaaatatcatctgaagaaattttgaatgcattaaaagttggaaacttttgatatttgtgttgaacagtggatagtttattacattattctttgggatctaataaaagtagacaataaagacagatatcttccattttaatggaaatgtattattcagaaatgtattattaatatttatatactgctgctccattgttattcagacatttgaaaaaattctttacatttctctatgtactaaatgtacaagtgttaagcagaatcataggtgaataaaaggtactcaatttgaggagtaccctgttccgactgtgtctgcaacatttttattttagggaaaaacaaagtggtgtgtttattgattctgcagaaggcatacacacgagaggggaataggtaataagtagaaagatgatcttgacaggctgaattaaatttggctaaactaaatttcatgattaggttgaagagactggcttttcaaaaatttatatggaataagtctaagggctttaatgcaattgttgaaaaatataattaaatcaatgtctaaatgaacagtggtttcatgaatcaaggaagattgggctccagctgcctcacttttaaagtgtccacatgagtctgtgcgtgagtcaggctggcatgaacttgagtctctaggcaggctttggaggctgtgctgggtggggggagggtcacagaacgatatggtagagacactatggtgagtttccaggtgactaccagcagcaacaggaaaagttactgacatgtacttgaggtttatttttttctttcatctcgtggaactcatcccagtggcccttagggttaatgctcttaaatataccaaatttatgctttaaattgacaagaagatgtataaataacagttgcagctagaagcttcaatattccctcaagatgtacctgaatttaagaaacataatatctaaataagactgtttctcagtgctgggtttttaaccatctggttcacaattgtcatcagaaagaatgaaaacaagtccatcctagaaataaggggtttaagacttcagaactgtacaacaaaatgggatgtggtgtctattgcccttttgttcagcaaaatgccaactcagatgacctcacttctagttcttaccccccacatatgttcccagcattcttcatttttcatacctaatatagtccttcatgctctgccactatttaaagctaaaactttcactcaatccaccaaaaataggcaagaaaaacaacatacaaatacaaatttatattccacagttacacagtggagaacagtgaagcttatttgaacaaagtttttgttgtttcataatactctaacttatttgacgtactggctaaaggtagaaatgatcagaacactttttgagattgttagttggcatattttaacatatgtagtgaaatcctactcagtctgatctttattagccatttctcccccttttatctacagaaataaactctcaacactctttcttttatcttggacttttgccactcttggaaaagcagaaaaatttccttttgacttcccaactacacgaactctttcagggcagcctggttttagctccagggtagtctgccatgatgctcagggccatggatcaccttacagatccaacctgggcctcttgttcgcatcgactctaccctgggactcagcctgttctccttcaggtccacaggtagagaatgtctgtgtggacatcttcatggacagagatacccactgacttctgatctgatacctactgacttcatttccatttcttcttttataatggagcgtaaaagcactttgtcatctgtgctgcagcatttggtaaaggaaatccagaacccacgctgggaccacatgcatttacattgattctagttaattatgtttgagtggagtgatcgcttttctatagtacatagaaaatgttaacatgaactattattattgggatgttggctgtctgccattcctaacacagagcagagggtaagaaaatgtcactcatattgggagagggcaaacaataatggatgggccaaaaagttagcaaatttctttcttttttttttttttagacggagtcttgctctgttgccaggctggagtgcaagtggcgtgatctcagctcactgcaacctctgtctcccaggttcaagtgattcccctgcctcagcctcctgagtagctgggactacaggcacgtgccagcacgcccagctaattttttgtattttagtagagacggggtttcaccatgttggccaggatggtctagatctcctgacctcctgatccacccacctcggcctcccaaagtgctaggattacaggtgtgagccactgtgctgggccgcaaatttcttttttgtgggagaagccactttagaagtatatatctacataccttgtctaagtcaatgtgttgctataaaggaatacctgaggctgggtaatctatacagaaaagagggttatttggctctcggttctgcagcctgcacgggacgcatggcactgacatttgcttgggttttagagaggcctcatgatgcttccactcctggtggaggggagaaggttaaagggagccggcgtgcagagatcccatggcgagagcagaagcaagagagagcaggaaggtgccaggctcttttcaacaatcagctctcaagggagctcccccaggaatgaatagagcaagaactcactcactctccctctgccagggaggacactaatctattcatgaagtatctggtcccaagactcaaacacctcccattaagccccatctccaattggggatcgaatttcaacatgagatttggaggaatcaaatatccagaccatagcacacatcaatagcgaggaagtggcagagtcagagttcaacaacctatgttttaggggacttccaggtatgtgctcttaatgttacatgactttttttttttttattgtactaaagtgggagtcggtgttaagccttgtgtgggaaggtatgcttgggcaaatcacttcacttcgatgagcctgagttttaaagtttataacatgaaagacttgatttaaaatataaaagcacataagggacttttatggtttgaaattttgctaaatctaggaaaggtatattcaaccaacaaacatttgttgacctttaatgtgcaaaccactatgctactgtcatgattgtacatatcaagcagaaactaactggaagccaatatttaatgactcattcacatattaaaattcagaaaaaggagatggttaaagacccgtgcttctgatagcatcatgatgagatggggtacatattaacacatgtccaagccaccatcctgacaaccaagctgtctccctctttgttgtctgctttacttaactccagatataagatctagagaattgtttatatattacatgtctttctatattatctccagtgccctacccttgagcttctcaattttagaatttgatcgttcctaaaatagaatccattttataaatctgcaccagaagaaacagacagaacttcagtccatcaattttcattaatttttaaagcttttttcatgagtagtgtggtaggtacattggaggtaacaagaatcattgattctttttttattctgttagaatttacagtagaggagaacttcaaaacaggtatctcaatcatggaggcagcttggcattccaaatattacgtttttgcatagctcctattttaaagagtaaaagtctattggcttttgaaggaaaaaaaactaaaagatctaagcagactgtactcctagccaatattctcatcacatttttcttactggctgaatcagtcatgccataacttgctaaatgacaatagcatgggaagtacaatgacaatttgagttatttttcatgtggatggttgttgttctgtgctttgattactgttgagaaatgtcggcatcaggctcacaaacaattgccaaggtcctatgacccacaaaaacttcaatcagcctgttcccatgttcagatgttttggaatttggatgtttactttacataaattatgatttaatattatggctatttgtaaggctactatgtgataattgtatcattaacttcaaatgattaagaaaagcaatctgaattagggagaagtgagttataaagtgcttgtgaaaaaaggcaacgtattttccttcaaaaatacagattaactctaggtcaaggcaataacacctaaaataaatcctccagggtcctagtttaatgaatacataagaatgatttgtacttctaacatcaattcatatggaatgaatgcttctaaaaaggtttattttgtgtagtataagtatgctagcactttgcttaagaatctagcttttaatattatcaaaagtaaagacagcctagactctcactgaattacctcaatttctaaattggtatgtctaagttacgattcagacataattcatatttatttcccatttcatgttggagtcaggatattcgcttctccccaaacctcaccccatttttccagtattcctcacctcagagaatgctatcattcattcattattttttacaattttatttatttatttttttgaaacagagtctcactctgtcgcccaggctggagtgcagtggcgtgatctcggctcactgcaacctctgcctcccaggttcaagctcttctcctgcctcagcctcctgagcagctgggatcgcaggcatgcaccatcacacctggctaatttttgcacttttagtagagatggggtttcaccatgttggctaggctagtctcgagttcctgacctcaggtgatccacccccctcggcctcccaaagtgctgggattacaggcgtgagccaccgcacctggcccattcattcattattcaattcattaatcaaaaagtttgagagcccattctactccacaaattaccctggatgttccctctccctcaactctccatgttttgagaaataagacaagaaacattcagctctgggaagggcagcatgcttctatctcagtcccacagttcatttgcccaagagacttgggcatgaaagataagcatttctagtccttttgattttgcacaggtcagatataggttaggcacaggttaacacagagtgggcagatgggagtctctgaccagctcatgcggtgcaggagttatactgttgcttcactttcccataacagcaatggatccgaaatggatgatgatgttccagtgtcacacaggtaggggcagcatggcagataaacgtgagagaaaaagcagtgtgtgcatgcacatgtgcacatacacaaacacatgtgcccatgcacaggcacacgtacacatgctgttgtgttccccacccagttgtctcaaaggccacgagtttgtggattttatcttcctagttcagtacaggactacccagaagttggtcgatattaaagcctcaaaggaatcataatatcacttttgtccagattttattttccaatcctctctttgttttatcaaaaacattttaggagtacattttttcagatggattatgtaaacactggacctgttcgttaaaaaaatttcttagagatcaagaccatcctggccaacatggtgaaaccccgtctctactaaaaatacaaaaattagctgggtgtggtggtgcgcacctgtagtcccagctacttgggaggctgaggcaggagaatcgcttgaaccgagaaagtggaagttgcagtgagccaaggtcgcgccactgtactccagcctggcgacagagcaagactccatctcaaaaaatatatataaaatcaaaaataaaaaaaaattccttaaagtttaatattgatatgttctatatgcaaacatgaatgggggttttccgttttttcactgctatacactcagcctctaacaatatctggtacatattatttacccagtgaatatttatagaaagaagatgtcctcatttacagacatgatggaatgactcccatcgtgaagtggtttgtcagggagagttagacaaaggggcttgaggattcccctcatttgccattacagtccaccccttggctcttctagtctattgagggcctttcttctgagttgctattggacatcttgaatgtaatggtgtccctagacaccagtttacattgtcttccagcatatgtcacttgaggaatctctagatgatttagaggtgtcaggctaacaaatccacactcattcctgaaaatccctggaaaatggcaaagataattgagctgatattttggcaattggcaggatgattttgtttgagtctgaagtgtattttaagaagttatttaggtttcctgaataccaacagtatcatgaaaatattatgcttgccacgttgatttaatcaatcaattctaaatcaccaaattatatcatacattttaaacaaaagcatttttactattgaaccctaaacatgaatgtgacttgtgatttttgtttttccaagagaagactaatacaaatattcattttagaaaaattctcagtacatgggctgtttgtatatatcttaccacttcatatcccaaccaaaatcagatccacaaacagcaagcaaacaaacccttgactcttttctcttttagttagttgtaatataacataagtgatattgattgtagcaatggagaatgattattgttactttgggggttgtgtctcaagtatacacaaatggataaaccacaatccttggtgcatgacaaggtcatgtacatccccctccctcctttccttccttctgtcactaaacatctacacaccaaccatctaaagccaaagatagaccttcgtaaggacctgtgtctatccagatgacttctgctgttataacatccctcagctccatgcatttgagtagccatcattctgaattccatgcttatcattctcttcctttcctgttcatataatttcattgtatttatatgtcttctaaaagcacatttattttagttgttttaatctttataatgatataatgctgcatataattacattgctaagattcatctatattgttggttatccctgtagtgtgttcacttggtctcctatataatatttaattttgtcaaaataccacattttgtacatccacttcctgttcaggggcatttgggttgcttctagatttttgctatattggagagttctgtcataaacacgtatgtacatgtttcttaatgcttttcttgtgaattaactgcttggcagataatttaaatgatatagctcctacttaaaaagtattttctatgtgccaaaaactgatctaagaatatttacagatattacatgtatattaattacatatgtgttacatatatattacatattacacatatattaattgacctgaggcctcacaacaaccaaacaagctaaatactattgttatcttattttactgcaaagaaacgccaaaccacagggaaggtacaaggtcacacagctattaagtagtgagtgaagcttgggaatgcaggcagtttggcttcagagtttttgtactataatgtctttcttggatctaaggacataaaggattgcaacagtttataacacataacttagttattgaccagaatttgagtgtgagtctgtcataatcaggattaatcaggtacagtacaccctgtaatgagcaatattggaaatgctcatgtatactataattactctaagacaaatgtcataaacatctttgttttttttttttatcatgggtacaaggcacataaatttatttcaataggacagctgctgcttttgatgcttgttctcacaattccgtggtggtagttgtatttgtttgttctcatgttcctaataaagacatacccaagactgggtaatttataaaggaaagagatttaattgactcacagttccacatggctggggaggcctcacaatcatggcagaaggcaaagggcatcttacatgacagcaggcaagagagcttgtgcaggggaattcccatttataaaaccatcagatctcatgagacttattcactaccacaagaacagcacgagaaagacgcaccccatgagtcacttacctcccaccggatccctcccatgacacgtgggattatgggagctacaattcaagatgagatttgggtggggacacagccaaaccttatcagtatttctctgtgtttctcacaaacatccctgagcactttattgttatcacccaccataggatggtcaggcccatctttcttccccttgaaggagcccaggcttctcctaggcttcagtgttaagggcacagtgggttctgggtgaccctcataaaatcagatcatgaatttaaggcagagccgacttgggctctcactctccaggggagatgttcttagatgaacaaaaattctccttagtcagaaaagcagcatcctcatcaatgtatggaattgtggcaaacatattaagcatgtcattccttaagttaatatctgtcactacataataactcacgataaataaatgtggtcaagaaactatattgtcacaggtacatgtaatagataaagacagggagcacaaccagcgtttgtttaactttgcaaggatcaaaccatcatcagaaccaccctttgtgtcttcattaattttttgttcatgctgattctgaatgtttagtctcaagaggaattatgagccatcagattggatgagtcaccttttagttataatcacaggagcattcaaaaatgaaatcactttattcagctggatgaaccttataaaaagtaaatgacttcatatacatttggcataaggctaatgagctatttttagtttttcctggaattatcttagcccttctttccgccctccgtgatgcctgcctccattttaccccttcccagtgctttcttggtcatgctaatcaaaaaggaaagggggaagaaacatgtggttttgataaccttcaaatcattaaggcaagggggaaaaggcccacaaaaggtggctctgaaacgtggagcgcctttccaagatccaaataaagtgttttctagagagtttcatgttatttttatcatgacttttataatctactactatcttttaaaatctgcattagaatattatttctggatctccaatctttatatctatttctacgtgggtatgactgtatgtgtccctcaaaaaatttcaattcagttcttgtgaaccagagaactcttcaaccttttctctttttttgagacggagtctcgctctgttgcccaggctggagtgcagtggcgggatctctgctcactgcaacctccgcctctcgggttcaagcgattctccctgcctcaacctcccaggtagctgggattacaggcatgcaccaccacacccagctaacttttgtattttttagtagagatggggttttgccatattggccaggctggtcttgaactcccgccttggcctcccaaagtgctgggattataggcatgagccgctgtgctggccaaatcttttttttttttttttttttagtaaaaggaaactaaagttacaataaagaaataaagaaacttacattttgttgacactaaatggcaggtttcatacaaagactaatcttttttattagggtaggaataattattggtgactttctctgccaattttccaagtgttggtaatacatgttgttactttttaaatgtgtttttgttacttttaaaatgaaatgaaaaagacatataaattatagcatacatgtctacccctacatttaaaacaatatattcctatgataaggcagaaaaattaacctacccttccctaacacaaacttccctttaatgcctgtggccatctgtagatcctgtcctctgttagcaaactccactcatttgctttttgaagttgagttcaagatcctcccatctcctcacctgccccgtcacccacatctctgcattactgtaggctcactgcatgtgcccttcatctgacattgaatctaggctgtcttgcaacatttctgatattactgccatttaatttaactttttatatgcattgccttttttttttttaagactagtcaagtgcagtagtgagaaggaagaaagagtggaacaaggagttcagctgtaattgactaaggtgactcactctgtggaccagcctgcattgcctttctggctacattggtaagtatgttaaggagagggacaaagtcacttgaagtttttggcctcggtttcctcatctgtaaaatgaagggaaccaggcctccgaatgttgttaatccaacacctataactctttttcccaaggttgaagatccccagtaatatttcagcttgctttcactcgatgttaatccaacacctataactcttttccccaagactgaagatccccagtaatatttcagctttgctttcactcagtgttccctgactcagagatctcaaaccctaagggagaggcagagtgtccttcagtcttgacgcctgggagctgtggatgcctcattgttgctcgtcttgcgacataaaataacagcatgctagtggccaaaaggcatgaagtgttcaaacttattcaaagttcaaagtgttcaaaccttttatgtacatgattctttaaaacgagggaaaagggaattgctctgttctcaatcgactgtgtctgagttcttaggatttatattagatccacactcccccccaaattttgaagatggaatgaatgtgttttctcctatatttaccactcaagttttttctttcctacatgctgactgtttgtgttatggtcattagattctagtactgaaggggttttggtttttgcctttgttctctgtgtgagctatgcagtggcttttgtgctgaaggagggagctcccgtctcatcagtttcagaacttgagtgatggattcgtcgtggctgctgatggtaacggtgggcactggccagcctgttgctcatgcagcgtgggaggtgagcgggcacagtgcccgtggagaggtggtgctgcctgatgagcttagggaaacccggtaaacaccgatgtgctctcccagatgcaaactgagtcacatccctgtcaggaaactgcaaataaatcgtgtgcaaaacggaacaaggatcctattaattaatttgggataactttattttattttttattttttttagagacagggtctctctccattgcccaggctggagtgccgtggtgtgattatggctcactgcagccttgactgcctggattcaagggaccctcccacctcagcctcttgagtagctgggagtacagatatacaccatcacactcagcaaatcttttcattttttttttgtagagctggggtcttgccttgttgcctgggctggtcttgaactcctggcctcccatctcagcctctcccatctcatcctcccatctcagcctctcaaagtgctgggatgacaggcatgagccactatgcctggccctgacatgagactcttaaccaggccattttacaaccaatttcatgcattctacaattaaacaagatagtaattgtgtaacagatctagacaactttttcatacagatatttattttcccaagttcaactagggctagagcggtttgtagaaatgtataggtctaaccaatgcttcagttcacatggtctcttgctgtacagcaacagccaggtgagttctaagtgtcaaagtgcccacaaaaactgcagtgtaagtgaagctaatctttggtgtctaacatatttttactgtgtattcacttcccttcatctttttgcattattttctgtctcaaagcaatctgttctacatccttccccatccaaattcccaacatatgttggggtttaggcaataatatttgaggcaatcgtagaggaatgtccaaatgtgtttgaatgaggggctgtttaacctcatgtagagctatttgaagattcagaaatgtacttctgaagcccgggtctgtctttaaaaggccagacttggtatatcagcacctattcagcacacgcacaagctgcccaacaccacactcagctgaccgtgctccccgccacctatcctctccactgatggagtttcatttttctatcaagagcatcaccattttgcttgtccagccccaaaacactgacatcatatttgactcataactcctcctactatcctcatgttggagcagatcctactgatatgaacagaagccagagaaattctaggcagaaaagggtgattccccagcaaaaccccaccctcaagctgaaaagcctgaaaccatggcccaaagtgagaacttgtatccctctttacccgctaaaatgttgcctttcctaaactacctataaccatgccccaccccatcctgtgcccataaaaaccccagacttagctggtaggtgggactacagatgaatgtcagagagaagcagcttgactttggagggacagcttgacggcgtaacttcggagaagaatccagccagagacagctggattcaaggggaagactacctacctgcccatcccctgttcagctccccttcccactgagagccactttatcggcaataaaatcccccacatttatcatccttcaatttgtttgtgcaacctcatttttcctggatgccaggcaagagctcagaagccaccagtgcaaatataaaaggctgtcacactggcctttgccctcgctggcgggggtagctgcctcatgcgaaaaggcagagggcccactaagctgttaacacttaagccgcccgtggacagcagagctagaacagcactgcaacacgccctctggggctttgggagtcacaggcacccccacctggatgctcgaacggggactgcatggagttcgctcctgccagtgccaaagcggccagcgggttccagcgctcatgcacgccagcttccactctgcttgctggtgcactccctcctgtgaggagttgagaggggcaggctgagtaaatgaggcacccccctcgcaagtgccgtgaaggggtcaggggaatatcctgcatcgctactgtctctttaaaatctctccagaacctgcacacctctcatcaccaccttctgtttaccacctaacaccttagtctagctttccagtaaccttatggtttttctcccttcctccattgacatcacctgcgttccactgttcccaaagtatccagagtgatgctcaaacatctgagagacatcaggcattctcctattcaaagccctccagtcacctcccatctcccctcctttgctggccggcagcatcctctgtgtcctgggccctcactgcacctctagctcatggctaccactcttcctctttgtcctccagcctctaatgaggctggctacctcgttaagccttggacactccaagcccacactgtcctctccctggagccccaggtctctccttgagttcttcagatttatgctccagcacctctgtatcagagacctttcctaactgccccatataaaatgcagtcctccatgtttcctttgtcttttaaaagtttttctgcagaacacttcttatcacctctcatcttacgtgtttgctttttatctctttcccaccacaaggattagctcagaagagcagagactttcatcaggagaacgtgattcagaggcaggaaatttaatcatggggtggaacctataaggacgttcagtccacgtactggcatcgtgtggctctacacagggtagttaggggaagggatgagtattacaagttgctgaaaacaatatatacttttttcctttagcaaatgcaaagaggtagtcagcttcaccacttaggcaaatgcagaaatattgctgctgtggaaaagggtgcaagagaaagtcagagtgaaacaaatcggtgctttataatttagtgagtagaatctgtaatcattactataatttaatcattactatcatttagtttcccactgtcatgatattgcagcctggtacacattaatattgccatatgttcatactgcacaccattatttgcctttgtcgttttgtgtgaaactagacaaacatcacaatctgactttggactctgaccattagcattgatttcaaacagtgctgaggcaattctgtgaaatatggaatcaccaccactacacaggatcttaaacttcaattctagaaatgggatggaacagctacccacctatccttaagtataatgaaaaaattactttcctggtgataacataaccttcattatttaagtggatatatggttgattttctatcttacatttaatttccttgggttttgttaaaattatgaatgatgaggcattgctttatcaaaataatacatttgcattttaacagattttcttccattctttctaaaggagtatctcaaataatgggaggagtcagcaggctagagtgtaggatattttgcagcagtgtcttgctttcagcttcacgtcatcccattgctccctcagccagcctctgaccctacacttggtctataccaggtttatatactgagtttcatggatacacttaggtggcattaagtagaataatggcagatgtaatgtttatataacttcacttaaatttagtttaggcttttttttttcacctcatcaacacagaaaacctataacctaaaatttgtgcagaaatgtgtttcacaacagcaattaggtatacaggtgtattaatctgttctcgcactgctaataaagacatacctgagactgggtaatttataaaggaaagaggtttaatggactcacagctccacatggctggggaggcctcaccgtcatggcagaaggcaaaggaggagcaaagtcatgtcttccatggtggcagacaagagagcatgtgcaggggaactctcctttataaaaccgtcagatctcgtagatgtattcactaccacgagaacagcttgagggaaaccacccccatgatccaattatctccacctggccccacccttgacacatggggattattacaattcaaggtgagatttgggtggggccacagagccaaaccatatcaacaggcatgctacctaaacctctcaaatcatttaaaagtttcacttatcttcagaacacatgagtctataaagaaataagcaactgtgttttgggttataagttaaaggcttgtaaatcattaaaaagaagaccactttaccatggcatttttcacgacagattttttaaaaatatcaacattttctcattaatctccatgaatttgtttgcaaagaataaatttacttaatcattagctttattctgcttttggatagcatgactaaataagttgcctaaactgaaagagtgatgttaagactaaaagtagaagttatcagtatttatgctgatgtaacaggcataaaatgggattatgccaggcaataaggcgaaaaagagatgatgtaacaaaattccttctattttgatattaatttagtctccagcaatttatagcttttctctccaagaaacaccactcctgtaccccaaggagatagtaaagttgagaaaagccctatgaaaaggccaaaggaacagacacgaaataaaaaataaaataaatatttagtttaaaaaataaaaagaaataatttaacctagaataattaagactaaagaaacatgagactgaaaatttaaaatcagaaaaaaactggtaaagttaactctatttttccctaagccctaacttaccaggattaaaagacactccattatatttcaaaattgtttttgatagaaatagattaaaaagtactttatgtagcgagtagaacatttctggaactcaacaacttgaaatacaacagaccaaaaatgtagacagaatctaaatcctttagaaatatgcaggagtgacagctccatccatgttttcctccctcgactacaagtggcttaaagacagaggtcataaaaaaagagtgaaaactactaaatgctcaatagataaataataaatcttaagtgcttaataaatgttgctggaatgtgtaacagaatattctgaaaggaaggctattcttaacagtcatgcccactgtgccatgtcctacaatgtgactgctggagagagattagaagtaacatctttttctatggcaagccacacagtcagagacctaagagaaagtagtcctcttcctcttctaataaatagaaatagacagttcctatatcatcagaggatttcatagaaaaagtatttcataacgaaggcttatgatcctgattatgggctacttttaagaactgtggcatcacctgctgctcaactcccagacagagatgggcgtggtctcccgtaacacctgctgctggggcaggctggcgaggtagtcaagagtgtagatgctggagccaagccagctttgtgaaaagcccattctaccatatccagatggatcacttcagaaagtgacttatcctctctctgaacctgcccacatttcctcctctagaaacagggataacaacggtgccaacctcctggggtggctgaaggacccagtggatgcgtatacacgaagcacttagaagtgagtctggcaggtactgccaaaaatgtgactcctgctgctattaaacaggggatgttgccttggcaccgacaggtgtgactagcggttgaaatatttcagatacggggccccttcttgccttggtccctcattcaaatgaattcacgaatcaggttttctcttgtataaatgagttttttttaagggcgtctactaaatcttggtttgaaggatgaattcttctgggctcacatttgcttctttactccacagatggtggagtaaaatctgtgttcattgcaccttccgctggtgctttaggctccaggagcagcagctccctggattgagtgggagccagttctgcctgactggtctcaccagcacaccagactgcgcaggcgggtcagaggcccacggggaggaaacatcagtggagggaggatgctgtgagcggtccacccctgcatgacagatgtccctttacagaaaagaagtgggaaacagactttggcaaagggaaacggcagagtagcaagatgattttgattactagtgacatttaattgcaattagatttttaaccacaaccaagaagatgataaagcttttccatgtattttccataaaactgtccgagcttaggacactttagtgctcattcttcctgcaacactacccaccacaggttcactgtattggaagtatactgagaagagctcgtggctggcgtgggagcgccgctgtcttcaaacctggaagtgaagtgcacccacacccagccacagcagtgattccccgggagcgaccttcagggagttgctaggagatggccgctctgtgtttcctttgattatagggcataaccctgccactgtcaaaatgccagaagaaaagggcagtgattgctggacataatttttttctgttacttcctgtgagatattgttttgcacaaagggaggagactaagggagccatggatatctctgtagcagaaacatggcaactattatctgaggaaggccgacatcctccaatagcgatcctgtgtgcaacgcgtattatttgcttcttcaaattgagtcgtatctttcagtaatttcttaagacgctagacggtattacacataggcatggggggtggcttgtggtttaaaagcagggcttacacatataggtagaagccgcatgtggtcaaaggagataaagtaccacaaactgaggagtgtagttagctgggcgccctggattgaggtaaagtagaaaaagactgtgatacttctgagcccaagacatttcactctgccacactatctcctgtatatgcagttattagatagacaattctttttccgtgacagccaatatcaggtagggcttaaaagtcacaatctgggtttacaacacaactcttctgcttattagccgcatgacctggggtgagttactttctctctctgtgccttggtttctacaactataaaaccgaaatacgttacagtaagcacttgataggatcaccgtgagaatggaatgaaatcatatatgtatggccgggcgcagtggctcacgcctgcaaccccgacactttgggaggtggaccacttgaggtcaggagttccagaacagcctggccaacatggtgcaaccccatctctactacaaatacaaaaattagctgggtgtggtggcgggcgcctataatcccagctactcgggaggctgaggcaggagaatcgcttgagcctgggagacaggcgctgtaggaagccaagatcgcgccattgcacttcagcctgggtgtcagagtgtctgtctcaaagaaaaaaaaaaagaaaatatgtaatatacttagaaaaatagctggcgcagaacaaatgattacagaaatatgagctatcattttcattattattattagcatcataaacattatttcgttgtgctctgaatgcagctgaacagtactcaagagtttcaggatcagttgtataaaattacaaaaaattagaaggtcacccatcttgagaaaagacaagtttgtataaacaggacaaactactgaaagcaggagagttcaaggaagccaagagaagctgagaaagttttcttaaatctgctgtcttgttggttgctgatcaccacctcattctccatgataggtgcacagttggcgtacaggttacctagggctggatactgattgagcatatcctgtgcacaaggacacctatgtttattccacttagaagtctgaggttgttctgaatgtcaagcaacaaaacaatgcacttctttgggagagctggggcattccagattctggtcattaactgggtgagtgtctttaggcatcattccacctttgtggacttctgctccctcgtttgcaaagtgagagagtcagacactcaggttatgttcccttaatctccacctttaaaaaaaataatgttctgatctaccttcataagagcagttgtgtgccttaattttctttgcaggtttgctctatgcagacctgtcatgtggaaactcagagttataaattagaaacaggtaaatgatttatttttgccctgcaaatgagtcacactctctacaagtggattattaaattccattaaataacaagcttgcccaataattctaaaatagaatctggttttaaaaaaaaatcggtgtacctgttctctgttgtataaagaaaggtatgtgatagcatcgttaaagtatatgttttagaaactactctggcaaataattttcttagagagaggttaccgagaaaagagaaaagaaaaatttagtttttctggcttggagaagcagcaagtaaaagtcacagctctggaaccaaagcaagaaagctccttgaagaatgaggtaatcagacttgccggtaggtactctcaaaccagcgtgaactgtacactgcaattaattattaaatgtgctcaggctaggtcaggctatactaacagaattcagacacgtttttctctccagcatttggttatcagttttgtgacatatagagtaacagttataaggatcagtttctgcaactccatccctcaacctacttttttattgtaaatagactgaatgtggggaaaaggcaaagagaaaaagtgctatgcttcaagaacatttgtcttgatattttggtggcaagcatcatcaaactaactatatttggctctgactagcttagcatgagatgttagtttttagccgcaaatgagtagcacttgacaaggtgagaaatcttccttcaattgttgaaatcatccaagacgtgtttctaatctacattttgaaaacaaaagccctagcataatgcaataggaattcttcttgcctgtataactggattctgctctagggtcttgtgggatggttattacacatggcagagaaagctacgtgtcctcttgcacccagtccctcttcttaatttataacggaagtttcagctgaacacatggctttagccaggctaagattacatttttcagtttcccttgttttatcaccaaattttgaccagtgggtgtgagaggaaatgctgtgtgcatcttccaagaggctgtggccttaaaggcaagaggtgccctctttgcttttccctttcctgctggctggaacgcagaactgatgtcaggagctggggcagccctcttgaccaccaagggaagccatgtttagcgctgagaaagacagagcaataaatggaaggagcccaggttcccagaattgtgaagcctccgtactagccttgcaccaccaatctgtacttttacatgagtgagcaatacacatcttttatgtttaacctctgttaatttgaatctctgtaacggcagctgaggttttatcgcaataaatgtattcccacagtcagaatccagacaatttcaatagttccattttatatttatgtataatcataagaagaaagtccccaattttacattaaactctgtattccttctaactgtcttgggttgagtgacacggcggctattgaacgtatttctgtggcactgtaacccagtagatcacacccatgcaattgctttctcttccttaggcccaggtcacttcacctgcacctctttaaagactgtatttcctttctgtgtccctccctccctctctccctttcttccttccttccatgtatctaagagattggcctgggcctccggtacccaggtgctctgccttgtgactccatcttatgtgaaaactgtgccaggtgctagaaaacagtttgcaaattatattttggtttggagaccttgaggatgcatttactgaattttttgactggtatttacatgatcatctcaaagaatgaattgcagttttttcacagtggaggtactgataattcaccccttgaaatgaggccgtgtgggatgagcaaccttgaaccaggaccttaaaagcttagattccagccacggctccgacacaaagtgacagccgcgtgaccgtaggcccatcgctctgtctccctgggcctcaatcttctcacccttgcattgggaatgatactaaagttcctcatccacctgcctcatgggattgctcagaggatagtgtgagacaatctaccacaaagtacaactgtgagccacttcctaactcctgctttcccacctattcttttttttttttttttttttttgagacagaatctcactctgtcgccctggctgtgatctggctcactgcaacctctgcctctcgggttcaagtgattctcctgcctcagcctcctgagtagttgggattataggtgcctgccaccacgcccagataatttttgtatttttagtagaaacggggttttgccatgttggccaggctggtctcaaactcctgaccttgggtgatccgcctgccttggcctcccaaagtgctaggattacaggcgtgagccagcatacccggtccccacctactctttaactatgacagatgtgaacgtttgatctctttgcagacaagatcagcacggtgactgggtctttgccctaccttcctaagcaaatgacagaactggtagcagaactggagcccctgaagcttctgcaggcaaacttcctggagcagcccaagaaagtcagagcccctccttttcgtcacattcagttggaattttggaaaccaagcataatggagaaataacttttttggtatagccggaagatgaacccttgggcacagtttcaaagtcaaatattttactgtaaagtggaagaagaaaatacccagatctttctgcatagtcaagtggcttatgttttgcacgcattggaaagaagggaaaacaaaagctgtcttagaagacgaaatcaatcacatgaggagtggcactgctccagagagctgaggtcttcctcttaggaattacagactttggttccgtataattaggccctgtgttgctcaacttccaaataatttagagagaattatcatgtgagagtgcacatatatacatttttttccaaaacaaccttctcaatatgtagcaaaatgtagtcaaggaagaaaaaaaatgagaagttctttagatttcagccaaaacaatcacttaagctccaagtcactatataaacaccattaatacctgttaaaaggtcgtgaattctgtaagagatgtttggaacaaacagtgcttcagaactacccacaaaaataaacaaaaaagagatcatattatgtcactgggtccagacaggatgatgaaacggctatgatcacgtataagctttatctatctttccagagaacagtgtcagggacatatgggttactttccaaattttgtttaaaaaatatgaaaaacatctgtgaaattctggtaagacaaaaagagtttctaattctttggatcgcaaaatgattcttcagttctaattagctatgataaattatgttaattctaaattattatcattcatgtgggcatttaatttaaaaagtggcattatttggaaaacagtctctgcaatttattctaatgtagtttaacacgaagcagctacattgcctttttggatattttcagaagtgtgaaaactgtgaatatcacttcaggctttgcagaatggtactctacaatgaatctgtgtctggcatctgattggtgataaaaaaaattattgggaatagattattagttattctgagacagaattttgagaaacttgttgaaagagtcttgtttgaagagcccataaggaacctcctccttcacacccatactctggctaagaatgttgactcttttttcttaattaaaggctgaatcactgataatattgttgatattaagtgcctactaaccagcagcatgagcttttaacacttttaatgtcacccaaaagcctacccaaagtgcccaggaaaataaacagttttctaagattcagtataattttattttgttttgtagctaaaatgcgccagagctgtattcatgtcatcacagtgggaagaaggcaaacatctgagaaattaataaatcccacagccgatctgagctgtcacccaaccccaaagggcctcagtatctgcatctgtatatggggataactcagttctccagagtttgtaacaggcctagcacagtgcctgcacatgtaagagctcagaaagttatttgtaaattagtaaattaatttataaaattgtaataaatcaataaccattaaaaaaaaataaaataaaataaatcccacagccactaaaagcatatcgtatttggggcacaactctggccatagaggcaagcacctgacataacacagatggcttcttgctggtagcatggtggcaacttcgctgaaaacacagagacaaggactgtttcactctgtctcccttaagaactttgaaaacagttttatgtctttggagaaggagcaccaatttagcttgcatcatggatcatatagaacagggtatgttttaatgtgctaaaacctaagcaatgtatttaacagagcaatctatttccatgaggttcgtgagaaaataattcagaggctctaagggaagttgggagaagaaaggacagcccgtaccagtgcactcaaatagccagaaagagcagagatgctgattgctccaagcagtagtctgagtcttattctattcatttccttagagtaatttccagtatttgttaaggcatacagaatttgggggcttgaggtagggagtgtgtcttatccatgcttggaaatgtaacagcttttgaagttttgtaatgtttcttttttaaagcaggcatctttctagttccactatctctgtggagttgaggaaagaaagtaattcatagacacagggcagcacgctgacctttcttcagtgaacgtcaaggtcctgggctcataagggaataaggaagaggaacctcagtatattaatccatgggctccagccacgtggcagctacatattttcaatcactttgcttacttcaaacttttcttggtgtgccatgtacattaagaacagataactaagaagcaacccttctcagtgtttttggcatctactgatcagcacctgacattccaagttatttcctcctctactcggcatgccgatttctgtactgttgaacagcaggaagtgctttcaagggtctaataaattagcctttcgttgtttcaacttccaagtgaagttaacaataaaagaagcttagtatgaaaaagatccagggtttcttaacctacctcttgtttcttattttctttcagtattggcttttttttgatgatgtttgggtgtttggggagtggaaacaccataaatttgatcttaagctgtgctgggacaacttttgcatgtttttattgaatacttgggatattccactgcccagagagttaaaaaaaaaaaaagacaaaaggatgagcagctagttaatagtcttcatagccaccagttatcctttaatctagtattttctagagtgctgtgatatttgcagaattaacccacaaaacagtatcctatgggccaaccggtgatgagactgagtttgcctttgagaactccggtgggtgttctaacctaactttcctacctctcttcactgtcatttatattgttgcctgaggactcttcctaatacctagccaaagtatggggggcctctgctgtctgagaggtcaacttctaacaatttagtgtgacctcaaggccaccccatgacctgactccattctcctttttcactctcgtcttcggccacctctctcaatttgccagactatctgctctccctggaatccaccatggacgctcatgctgtttcccgaatctggatgtagaatttccctgacctttttatttacaaaattctacccatctttcaagattttccttttcctgagttgattattctttgtttctgtgttctcaaaacactttccttgagcaatgctaaatactagtttccttcacgtctgtttctctcaccgcagcatctgtgagattaaggatagtgtctttttcaccatttatctctcactgctcctagttcagcaccttgcatatctttcatgctcagtgtacttaaaaacaaaagaatcatacataagacggtgttgccagtttatcatttaatgaagaggcttttttcttttatcaattatggtaaatctttgactagttcaaaaagggatttaggcagatctatttttgagcatttctcctgttaatatttatattgaacttcagccttttggggtcaacagctagaaaccatcacagcctgctataatccattagttacaaaaggatggaaattatcctgcaaaaagcgccaggctgcagaggttcttgtttggaattattacactgctgttggatattctaactacccacttgtgttcaaaggagaagcggcatttgagaaagcttctaaatgtgggttctgccacctaccatgtagaactctatgccagtgggtcaaacatacttgccgtctaatttagcatcccaatatagattctagcagagcttctttgacatagctaatctctctgagtttcaatttcctcacctataaacttgggagtaacgactttgtgtggcaagaaccccaagtaattaatcaaaattctaactttgtgcttggacatagggattgatcataaatgtgggctattattgtcttgatctttgtttttgctgttgttcatatagtacttattaatatggcttctaatttcaggtttgtcatttctgtcgttttaattttattttatcaaataaattatcataataatcttttcattggctctcctgtccctagttctccccctaatattgatctctctccttttaattccaagctgcaattgcaaggctaatattttgaaaggaacactgacttcacattatctattaataaattctaaaccaagcccaacacaacatgatcctaacctaattttcaagaatttattttccttctcagtttttttttgttttttagtcaaactgaactttttgttgctcctttttttgtacatttcatgttttagccttcatttgagtttaattagcacattttaaccagatgcctacattgtgtcagatattttctgggtagtaggagtgtcaggataatccaaaagaatccctgccttccaggagcccatgactggtgtggcgaggcaggtgtgattttgattcatcttttgtgagatgttttattcgttgagattacctctaattactcttaaaattacacacagttttagaagtccatctcaaaatagtcccctatgaaaaccacataaatccctctcactcatttaaactaatatagttccttttctgtgccacttcatcttgtcttactttatgttatttatgttggtgttttcttgagggcagggatcatgctttattcacatctgtgtctttcatcgtaccttatgtataacaggcttgcaataaatatgggttaaatatcaaaggaatgtaatagtacaatttgactttaaatagaataataaccaaagttttcagggaccatttttcaaaagacccattcccccaagatacttaacctacaatgcttactttgtataagctctgttacttaagctaacaaacaatagttctggaaacctcatatacagaaacataaggatatttagatgtataatatattatatatataatatattttgttacaccactagacttggcttgaatgaaccagaatattgcttgcttatttccttgatgttcttttcttacacggtttgttctacaaatgtataaatattaatatattagaaagttatagaaacagatgaaggaaaaatagacacaaatatagtatggaagcctggacataaaccagggatttcagaaatagaagctatggagatgcatccgggaggagggtctgttttagcacatttgggcatgcatctttaaataggagacacatttctggaaggaacatagggtcctgtgggtaaagtattgggttgccttgttttatatttacttgaggctattacagagaatcaactacagtgtaaagggagagcaaaaccaagcgagtttggatttagggacattaagtacgctttgaacagatcagaagccctggacagacgccaccacaaaagcagcagcatctggaagtacacgtgctcatctctttgtattgcttggtgtgatttccatggctactaaacgagtcattcacttcaacctacattgatgtgatcaaaatagtttcatcagagcaaattctcatcccctctgaagagtggacagattcttaaggattgtccacgtttgtattaacgaccctattgcttatgccgtcacaattacagctaaccagataggtgcagtcaatggattttgtcaatgatttaccttcaaagtaacaatactcacatacaagtagaagttaaaaggatttcaataaatttggtaattgactttttaactatacgtttgtgtcaggcatttatacttagcaaatcttatttatttcaatgtatttgattgttctgaaatcagtgacaggttaataactttgttatcagattactaaattaagcttttatcagatcatgtttacattaaaaaagaaaagcctgaagacattattaacttcatttcaacaagcttctgtaaataaataggctttcattaggaaaccagccctatttatcaaggttattaaaccattttgtaacaaaaagcatgatttacaaaaatgtcccatgattaggcttattttattttgatacgaccaggtttgctacacattttaacataaatcaagataaacagcttgttcagaaaaaataaagcttcagaaaaatgcaccttaatcactgttttgagttactgattaatgtttgtccctgaatctgctccagacagattttatgttttctttgatgactttcactggaatatggttggcttttatgattaaacccatccttatggtataatccttgactaggagttagacattgaaaaacacttaaaactatacatggtcaatttcttataattgatttttttcagtaaactcatggagaataacttttgtggtgattattagaatgttcaaaaacatatttctattgtgaaaacccagtgcttgctttctgagtctgcgggtctatccagcctgcccaagaactcgattcagctaaggttctcccttccattatggagcctggaaggttttatgcaaaaccagtgactgtgctccccgagaaagtccactgagtagcgtgctggacagaacctgaccaggactccatgctttcaagctctggttctaccgtctgttacttaggcaaatgttttcacctgactgtagggttgattaaggcttttggcttgccccaaaaacccctgtatttctggatgggaatcagttggaagtattttgctagggtcctgtctttgccattccatctagctctagtaatcttgatggctcttatctcttatgctctggatgaaaactggtaatacttctttctccatttgttttgtgtaagcatggtggtcggtaagatgatttctggtgaagcagcaaaaccacaggctcttgtttctaaatctggttaactgaatgccttctgtgttcacctgtcatcacaaaaggatgcgcaggagcactcattattttaatcggagtcgttcctaattctaaagttaatcatggcgattctcagatcagggagaaaattaattaagatgcaatgctattttcttctctcccagggtgacatctcccaggtttctcattaaatcgcccatttagtgtttggtttcagtgctttggagccaggcagaccagatgcaaaccccagctgcatgtgccatttgctccctgaggggcagagatgatggccttgctgccagtggcatctccagccctggaactgtgctgggtgcacacgaggagccaaatgcatgttttctgaggggagtaagtggaagaatgaatgaagtcagcccttccatctcttcttccttagctgtcaaataggatgacaaaatacctatttgccagtggttgttgtgaggattaaatcatagatgtaatgcatttagcacagtgaatgggcacatgagaagaattctataaatggcggttgttcatcttcctacaggaagggcagatctctgagtcatagaaattgcttcttatttcccactttcctttatttccttatgtggtgaagtataagttccactggtattcaacaagtaaaactcttgttcagggtaatgtgctactaacttttaagtctgcatattttaaaatgagagaaaatctagttttttcattaactttctactcatctctttctgggcccgctcagcaaatccccggtttcagaggactgccctgtaaggaactatagacagggtttccatccgtatttccattttctgaataagtaacaaggggaactagactctcagggcctcctctgcctgcttcgtccttatggagctgatgtggggagaacactcctcactgtccagtctagtgatgaccacagttctgtagccacgtggatctgtgtactcgaggtcagttagttccagaaaatcatccagtctaacatttgctcagattccctaatttctactctgtgaaagacaaggaatagtacagctcttcagtttcctgggggagtgcttcattacttttcctctttttctttctacttagtctaatgactcagattccagatggttctgcctaagtttagaattatcatgatctactttgtagagagaaaagaaaacatttcttgtacagtacaacttatgtaattttttttcagggaagtgagaaaaatataacacgcagtgtagaagaacttttggctctaacattagatatcaatgtttcgtattctgtcattggggtgtattgtaatttacttatttactgtctaattccttctgtagctagtgaagtttacattttcttttttctttttttttgagatggagtcttgctctatcgcccagactggagtgcagtagagccatctcggctcactgcaagctccgcctcccgggttcacgccattctcctgcctcagcctcccgagtagctgggactacaggtgcctgccacggcacctggctaattttttgtatttttagtagagacggggtttcactgtgttagccaggatggtctcgatctgtgaagtttacattttcaaagaatgttttaatgatatggaaaaatattctccaaacaatgatgtgcaagtacaaggtacaaaccaggaaagtgtaattctaattttttttttttaaaggtcaatatactttcttttttttttttttttttggaaaagaaatattcctaataattcatttaatcatctggagagtgggttgaagttttgtaaaatttaatttcttcattatagactgtattattttaataaaagcttttctttggtgtcacccattgtgtgcagcactgagctggggccctggagctctcactattgtccatctggccgcaccactgtcagcactgctttcaatgaactgtaacagaatactgatgactcagcatttctgctgctgacaggaagtccttgagcgagtctctttgtagttcctccaagaaaggatgctcaggcactccttgggtgaacagctgcaggccatggagaggacaaccgggttgcagtagtaagtttgcactgggctatcccagagctagaacaagggaacaggtcagcccctagagtcccagaggtcacagacttgggcaggtccaggcgttaaatgcagctgtgcctttggagctggacatccaggtacctggctgcctgctgggaacaggtgagtatgtatcagccattgtgaagcctcaaaaggctgcagcctgacgtagctgcagatcaggctgtacccaaattgcattgttactgatgaaataattttttaaaaaaccaatggtatctatttgagcattttcctcatggacaccattcaacagaatgctgttctcggggaacaaatgactcatgcaaatgactattttctaggtttttctcatggtcaagcagccatgatctttttatagctttattttattttaactcagtcccaatggttaatttaaatcctttctttctttcatcaatgatacaaagagctcactttactacagtctcatcttgacagagtcaaatgcagaggctgtaaggctgcccacctgaggaggaggaactggaacttaggaaaacagctcagatgcttcatgcaaatgaggaagctcaattggcttctattgaaaatacctcacgcatcattttctcttgtctctacttgccaaaatatttataaaatatctttgccctgccatacctaactaagcctcttggaatttattttttcagtgagattctctgatgcaataaccaagcactggcttttagaaagtgttctctccccctccctccctccctgcctgtctctctccctccctccctgcctgtctctctccctccctccctgcctatctctctccccctccctctctccctgcctctctccctccctccctgcctatctctctccttccctctctccctccctccctgcctatctctctctctccctccctgcctatctctctccctccctgcctatctctctccctccctatctctctccctccctccctgcctctctccctccctccctgcctgtctctctccctccctccctgcctgtctctctccctccctccctatctctctccctccctccccgcctgtctctctctcttcctccctgcctatctctttccctccctccctgcctgtctctctctttctctctctctctctctctctctctctctctctctatatatatatatatatatatatatatatatatatatatatatgtctgtttctctgtctcactctagatatacaatcaaatcagtgtgcagatggaggacaaagagtatcacaaaattattattgtaacttgtggataataaatttcaaaatctgatgtctgtgctccaatatctgacctccttttttgcaaaatatgcacatgtgaaacctgatttactactgaggaagttaaccctttccttttgaaagtaatgcatcagtagaagatggaaagttcagtggagatgggtgatcttctcaattatgtgcatgagaataagtaaactcccaggcattccgtcactctccaaagtcagaacaatcaagaggacacatcaggctttagaaaaactcattcccttggaagataatctcaatagcatgtgtgaataggaagagcatcaaagtgtgaccgagagagtgtcagagaagagtcacctattacaagcatgatcatagtacttaggaaaaagtaagttccaggcttatgtggatattcatatagatattttccagggttttagaggttcatgatttctcagggagaccaaagtgcctatgtgactgtgaggggttattagtcctctgggttctggctttactcagaaatagcctggaccacatgggtcagtcctgccccacagacattaggccccctcctggggcccctgcagagtgggtcagttctgcagatgtgggaagggatgagtgttgggtttgggaaccaaaggctgtgtgttgagcttacagtagacaatttggagctgcttcttgcttagagatgacccaatatccaaaagtagctattgcgggcaagtggtgttccccaaaaaggtatgttgaagtccttcctcacccccagtacctgtgagagcgatcttatttggaaacaggatctttacagatgtaatccagttaattgaggtcatactggagaaaagtgagccctaaatccaatgactggtattcttacatggagagagagatttggagacagatccatagaaagaacattgcgagacaatgcaggcagagatgggtgatgctgccataagccaaggactgccagcaaccaccagaagtgggaagaagtgaggaaggattcgctgctggagccttcacaggcaacccggccctgctgacaccttgatctcagacttctacacccccacgtagagtgtgagacaatagatttctgttgtttcaagccacccaattggttgcactttgttgcagcgctctagaaactgatacagtggctcaaacagagcctctaggtgtctcttcttttgcaatccaaagactgcaccagtgctacttgaaggggtaagagagctaaataaatttgcttttggggagatagatttgggtaagtttctccatgctgagttagatgagtgatatgtggtggtggtaaaatccagataacccttgagtgtgatgatttcagaaagagagagccaggaggcctgggagccagcaggccagcgggggtccgcccactggccccgaaacagcgaacagtgacattggagcaagggcccatcccgtgcttctctggagccccactgggcagagccaggtggagaagcaggaaactgcacattggtgggctggaggggcttggaggggctgagacaaggtgtgtgcttggggataagggcgttcctggtccccggtgaagcatcagtgaccaagaggcatcctctagaagaggtagacactacatgggaagggagaagcagcatgaaggaaggcgctttaggacaaggggatcagttacagtttcttcgccatgtgccttagacctacagcttgctattccactctgaaataaggcagagtgaagaattcaaaaacaatcactctgggagaaaaaagcgagttctcttgatatccttgctttctcctggcctcatttcctctgatgttcccctgccctcttgcaaatcaatcagcctaaatcaagggtgtctgtgcaggttctcaagacagacatgctgctgggagtggcacgtacgtgaacgtcaaggagatgtcagggcatgcgcatattctttggtgcccaccgtcttattttcttaacttactgggaaatctttttgttagagtgcacgcattaagtttcttcctggcctcatcagccccaaacccaggcagtggcgggcggtttcccgtgaggacagcgtaccttctgaagaaatgcacccagatcagaatggtatacgagtctgtcctattctcgctctagaaaagaaatgtcacaataaataggtgggtggggtctgccccacactccccaaaacaaccaaaacagcggcgagatcaaactgaggacaacgttatcatcatatattcttttctttacacagtttgatacctacctacttctcagaacaaacaccgcggaaaggaaactgggtggatacttactgtttttagtttgttacatactacaattagtcaccattagctaattatatagaaaaggggaaattggggctgttttacccagagttggttttaggtgggggtgaagcaggcagggtgatattggcagcctcatggttggttttgctgattcagttcctctttccttgccccctatttcatacaaaattcctctgacaaagcttcctgtgtggccactggtcagcattttaatagaatggaagggtgcagcacagcaaaggccatagtgttaatatccctcgcatctgccgttcccacctcctccttgcttttccagtcctttccaactctgcataggatgatggggagaggagggagctaggaagggtgagaggcaagcaaagtcatttccagcattttaaagtcagctctcccaaaatgctctctctctccatagccttctccctactggggcttcaaagccttccctctacctgaaaccactcagggtgcaaggaagcctcttcaggtccccctcatccttgatcattacaccagctcttgaggatcctttctttctctaaatttggcaacaatcttctgttgcagactcttttcactattggaattccctttcagggactgctctctacaacttatatggctgcagcagcagcttatctgaccatttaaggctctacactgtgcagacagaaaaggatcacactcctctctcagacacattataagaaattttatacaaggcctgtgcattttcaaaacacaggattgacctaatgagcaggaatttgagaccaggtaggaaaagagggtcatgggatgtggggagctgcctgggggctggtgggaacttgccaggggtcctcatatcccttcatgagacagttgcctaatcagcctatttcaagggatggccctgatttcacggtgaaaagcaaggcatgtttctgcagatacgtcagtgctctaacagcaacatgtcctctgctaggaggacatcctaggagattcgcttccattgaatcagagtaaactatttttttttttttttgcttcttggcagaatattatttgcagatatctgcaaatttggtaggaaagcttttttttctaaatggaactatcctgaaaacaaagggaaaaaagggcaaacacacacacactcacacacacaaacaaacacacacactcacatgcgagccttcccccaaatccttccaagtcttcattctatttaagctgttcataaataatatctgatgataatctcattgaaaatgcatctgtttttatgttaatttttgttaatttgacatccctagacgatatcatgaaaatatttactgtgtgtacgtttgtgtgtgtgtatgtgtgtgtgtgggtgcaattttgtccccttagtccatgatgaattaaaataagtagtttacctatagataactaaaattctatacatgtcttcatgaagtttaccttatttaaccgttgcaattaacacatatcccagaaaaatctttaaattttatttttaatattatcctaatgttgctgagttcccagcaacacaattatttattgcagccaacatctaccatgcttactattacagcaagctcttttccaagttcttatatcaataacacacaaggcagggcctgtgatatttcccatttgtggatggagaagcagagccgtggacaggtgccaagtcacccaggtctcaggggtggggtggggtctccccacagacagcctggctcagacacactctccactgccgcagcgcgagggacccttgtcatcatcccacagagtttgccttgtcattgcttctgaagtgcttagagactgtcaatgaaggagcaatctcaataaactttgtggttttgtcatcctcagaaatgaccaatcttcatgaaggtggtgttgtgcaagcctgggcttctattaaaataaaaaagtgtgctttgcacctaaggcaatggtgggattaaagcaagtagcaaattgatgttctcatttaaaagtcttgcctggtctgtgagtgccctgggcctgcaaaggtaaaagaagcctgaccacaaagcaactgggcattctggaggttactgggcagacctgagactccagagaaagtaggaagagaaggcagattgtcagttaatgatggcggtgttcgtttctgtttgtatacttttaacagtctaaaaatggggcttcggacacaatacctttcctaaatgaaaccagtgcctgcttcgttacaggcacaaggtatgtactgtgggtgacatccagcccccttcagttttccagagtctttcctggggtcttgcttggctcagggccactggaacacaacccacccgatgacaccagggtgtgtcgagcctgtggtcaaggttcacacgtctgtgtgtgccacaaccactgcagaggggaaagacatcatccacacaacatcccaccctcagcagggacttggaaaatcaggaacccgatagtccatagttggggagactgaaaggttccccaaacaagcaaggctgctccattttacctaacaataccatacctactggcacggtttctccctgtgccccattgctaacatttctccttcgagttggcatgccaaggaaagcacagtgaaaaatgtctgagttccgggttgctcttagcaacatccatgaatctgagtttctaacctccttccctatagaacagtgcctgaaggaagaactggcaatgctcactggtgtcagaattgcccacgatttttcccttttcagcaattatttaagtgctccaaaagcattgcttccttactgttttcaaggcaagatagaaggagaggttaatcttgcttagaatttcctctgctttcaagttccaggttgggggtataaagaggtttgatagaaaagaaccgcagcagcccaggcctggctgcaggagaaagcaaagtggctggggacagggggtgtggagagcaggtggtctcccgtctcctccatcagggtcaggaatgtgtctgctcctttactggaaccatcgccctccctggatggctgtaccgtttagggaggcctgtgctgacaatacaggtgcaattcaaaagaaattccattaaaataaagtgggcagtggggagaaacggggaattctgtcatgaaacataaaacctaaaatactgtctggtcaaaacctagacagcctgtgagacccatgagagctcggagaccctgctttcggagcataggtggggacccgaggggtggggccgtgagcagggtctcaggccagccgtggagaaggcggctgcctctgcggggatgggcaccgcagcgtggtgggcagatatgaggaaggcaaggactttcccattgaccatgcaaaaccttcacgaagtcagggtctgtccaccgtctaaagatcgagacctcatgttgagttctgaggtaaaatgggaaaacagttttaacagtgcagtgaagcttcctgccaataagcaaacctttccaccctccgctcagctacagaaacacatttgggagctccagggaggaggcggaggggcacaggcgctccccagtgtgggccacgctcaggtgtcccttcacaatggcagccacactgcttcgtgaaacggacacactacgggatggaaaacagtgagagggaagccacggcatcaagaagcaataatcacagaatgtttttgtgctgtccacgccttcctcaacatctgcctccacttccaagtcaatcgagacagcctgtttatgtggagctttgagatgacacatacactttactgaccctagaacaataccctttccacatctaaagcaattttcgtgtaaatgactgtgccattaaccttccagggtcattcaaatattttctgagaaattggctgctttcgggattttcttagaatgccatgtgtttcatttttgtgcagaacagatgacaggcgaggcattccaacaggacttcagttgatttaactaattcctgtcaggggaagtgaagtgttgggattcataaagccgatcccagcccggagattttccttttcccaaaacagaaaaaacaagacatgctgtgtggttttgcaaccgggcaagtttcgaaatatttttaagctttctactttgccaagtatttcataaaaaaactattttctttttgtttcgtgccaaaaaatgtcacccctaaatattttttcccatatctggtcacatgtccaggattttttcttttctaagaataaataatttttctgggttataaaaattccacttgctctatcagattaaacatatctttatatagaaaaagcatccgaaacattccccaagtgggtctaagggaggagtcttaatacaattttgttaaattaattttgattaaatattaggccttgaattctttttgtgactctcacaaagttcaggcttattttgttacactttcaagtctccctttttttcactctccacatactgtttccttttattagaaagcattcaagaagaattgattggtgtgtttgaccaaaataatatgttggaagtgataccagtgcaaggggaccctctgggttccattctctatttgcatagttagctggagttagaaggttcagctgtcagggattcaagaactctagcatcaaaaaagtgtgaacttgcaaatgagctgtcaaggttcatagcaagtgaataatgcagctgagagctgacttgtctccaccctggtgttctattgatcttgctgctggataaagcataggcacataggaacactgaaaaatagcaatttgtatgggttggactggtattttcttttttaccagttaaaatgttaattacattcacaaagtcaaaaagctgaataaatagtcttacagttggaaatatagggcaaaacaaaacacaggcttgaaaaagcaataatagctatacacctaaaatgtgaaaaatattcatagagaaatgaattgtagggcattaactcttgcaaaaccaccaaaggcctggtggaattaatatgctacagatttgaaacttaacattgggcaacttaaaatgcatgtatttgttattgatatttaactaatccttgtaagtaaatctactataagcgaaaagcattctaaattgatgttattgctagtttgcagggaaattctgaaagtctatgtgtttgttggtgcatgaggggatgtgcgtattgaggtgtgtgttcaggatgagggcttctggtcctttagaaatggttccctctaagcttcttggtttccaaatcttcatcactctttttaaaatctaaaaatgcaggtttactttatatggagagcacattgctatgaggagatgtgacatttcagaaagagcacatggcactgattctgaaatgctaccaagttgcttcagaatatacccaaattctctcaaagattaatgatacactaagaaactgaaggacacagcaaattattttgcttgtcttcaacccactgtcaccctgccacaaattgaacctaataaaatttccatccctctcccatcttatgatatgacccttccccctcatgcatggggaaattgttatttacattgtgaaaatatcaagcatctccaaacacttacgttttgtggagccgggtctcccatggtaaaatgagagcccaacacggtgagtttgcttcctaggaatggcaaatcagcatcgcgatgccctcaaaccagaaataatacccttcatttgctgcaactggttgagtatcagtgctataaaaaatagatgatggaaaaccggagcccttgacagaaatacaagtctgctgtgtgtggcttgtgcaggaatggagcagagagaagcggtggtcttgtctacacatcatacttgggcttcgcccatgctgacaagtggaagcacatgcacagtggacacacgctgtcaggacattcatccctgctggcacgtaaacggcagggagctaaactgctagaattcaagtggcacagaaacttgagcctatggaatatcactgtggagtgggcaggccaagttctttacagtgctctttgcttttgcaaagaggtaatttccaactcaagaatgctctgtggctttggcgtcaagaaagctgaaagtcagtgaaatagagccttgaaggtcatccaatctgcgctgcagcaggaagtgaattttgggagccccaaatgcaaaataggcagctcagcccaacattaactcagcccaacactaactcagcccaacattaactcagcccaatattaactcagcccaacactaactcagcccaacactaactcagcccaacattaactcagcccaacattaactcagcccaacactaactcagcccagcaccagctcagcccaacgctaactcagcccagcaccaactcagcccagcaccaactcagcccagcactaactcaacccagcactaactcagcccagcaccaactcagatcagcaccaactcgaaccagcactaactcggaccagcactaactcggaccagcactaactcaaaccagcaccaactcaaaccagcacaaactcagcccagcaccaactcagatcagcacgaactcaaaccagcactaactcggaccagcaccaactcaaaccagcaccaactcaaaccagcaccaactcagcctagcatgcactgattctctggcatagactcagactccaaaaatatgtcgagaaagtctaaccaaaatttgcaaaattaggacctgtggtcagtaccttgactaaatatgactctgtctatgaacacaagtaggcataatgtaacataagacagtaaagaggggcatcgttagaaacctttagcattatgtcagaaagggcaagaggactcaagtagaagaaaggcagagagaataacagagggacatgcatgaaaagtacttttttcttcttcagtcctgcaattgcattaggaacagaggtcaggcccaagagctgccctctcctcacttttctttctttcttttcttttttttttgtttttttttttttttttgagggggagtctcgctctgtcgcccaggctgaagtgcagtggcatgatctcggctcactgcaacctccacctcccaggttcaagagattctcctgcctcagtcaccggagctaatttttgtatttttagtacagatggagtttcaccatgttgaccaggctggtctcaaactcttgacctcaaatgcccgccttggcctcccaaagtgctgggattacaggcgtgagccaccgcacccggcctgtcctcactttttatcacatactcctgctcttgtggccctgcttgaacacagcaacagggtctacataaaataaattaaaatacatttaaaaaaaaattacctgctttacttctggtccatagcattggacatacccagccagaaatcatacactgggctggtttttgggagccaactcaaatgcttgtcctttgaggtaagtattagggtgctcgtggcctcccgccccacgggtccttcactcactgaccctgacctgtgctcactttgtctcaccacctacatttcccaacagttcatgtttgatacagctgctggtcctgccaaggctggaggccctccccatccgctgatttgcctttctctgaaatcggcatcttggctcctctgcattatttctgattggacttgtctctctggcttgttttctctgctaattctgatgaagacgataatctctagctctcaggggccagccctggctacacagtttgggggtagtgttcaaacaacccttgagaatcttatttttcaaggctgttggctggcactttagggctaaagcaagtggtgaattaaaacacaaaacaaaacaaagcaaaaaccacaggcctaaataaacatatgcacccaggagcatgactgtgcagacagactgcctggctttgaatctcattgccaccattgattggccacttaaccttgcatatcacaagatgggaataataaggcacctgcttcatagattgttcttttagtcttctatccgtttgttcattccttcagtaaatatccatcgagcacctactactgcccagacatacggatccagaaatgtccagcacagattaagaggccacagcctcgtggattttccattccagggcatttttcttcaaggatccaataagatatccccctaaactatacatcatagagcctttgacacagtaaacactcacatgccattagctgttatcacggtaacaataaaaataaacttttagcaaaggttttaactaaatgaggtgagaatcataaataaagatatatttgctatagtgaaaaggagagaaaatgtaggaaagtcaggcaagaggaatatttgccaaaatcattcatgaatctgacacattagattctgggcgtgtcctaagccttgacctgtgctacttgatgtgggatttgcacacctgggacacacgagcttctgaagttcagactgtctgcactctatctgacacactccacagctgcacaacttgcagcatgagtcagcaccatcctaacctctaaagagccccgcgggcacagcgaatgcacctcccagccctttggacgtggtggcgaccagctggtttcctggagaggcatctcctttacacccatctgtgaaagaaatctagatctaagccttagatctcaaggttagaaagggggtaaggttgaggttccggagtgctactctattagacacattgtcctttttaaattatatttttacaataatttccatttattattttttcgtggcatcctagtgaggcaggctagtttgacaacatgctgcttaggggaaatttgctgttaataagtcttttgagctcactaaattttggtgcagcatgaaaacccagactgttttcaactctctctctggcatacccgcttgattcctgatagggctattaattttgcgcagatttcccaatttgctccccatttgctacctgggatggtgaagaacagacaaatagcccttcggaagcaaaagcagtcccaaaccaggctgagtttcgtgatggcttcttccacattgtccttcattgctgaggatgaaaacatagagctaaaaactgtgatacacaatgatttatcacctcctttccatgtacacacctagtagtttagaactctgttagcttcaaaatctattcagtcacattgcattcccctccccaactcccacaaattctacatgaaagagggttcaggtagcaaatgagtggaaggacagggcaaactaagactctgatggtgagcccctcctcctcctgattcagatgatttcttcctcctcttcctcctcctcctcctcttctggttctttcttctccttcttcttcttattcctcttcctcctccttcttcctcttcttctatcttctttcctcctcctcctccttctattttctttcctcctcctcctcctctttctcctcctccttcttcttctccttctccttcttctattttctttcctcctcctcctctttctcctcctccttcttctccttctccttcttcttcctcccctcctcctcctcctgtccccctcacctttcccctttccctcctctcccatttccactttcttccccttcttcctccttctcccccttcctttcctcctcctcttccacttccccctttctcttctccccctcctcctccttttcctcttcttcctcctccttcccttctctctttttttgttatttgatctccaattttcacttcctaaaatttcatatggttggatgctattataattattcaattacacaatgattacatgtgggctggtggttttgaaacaatgtaccccattgtatgcattattgcattcatgtggaacttgaactgtaggaggtccatgcaggcttttccagggtccccaagagtactttgtgggttttggatccaggtttctgtttcactaaatcagcatattactctagtctacagtgtactgttgggctagaaatagtccattgactattttagactctgcatcacgaaacgagatctatggttttggttgaatttcatagaagaatattgataaattatcattgttcagatcattaatcttctttagctcaaatcaaacaatgaagtgatgttatcttgcaaaccatgcaggcaggtggtggcactaatgagcctgccacatcggattaatctttgaatgttcagaatctcagaatgagaactttccacaaattcaaaactgtttgatgaactgacaatgtccaagtccaccaaatggtccaacattcagagatgaaattatgtcatgacataagaagcctaatggaatgaatggccactatgcattaaagaccagaatgtgaaaacctggctcctaccattcagacttccctgaaattgtgaaacatgattttccccttcaccctagggaagaccctctggcaaaggcacattcactaagggtgagccttcttttggattgggggctcagaagagagagtcatattgaagtcgcccaaactgttctttgccctggctgcccgctgactttgttaggcagctggtgctaaggagagggtaaagaaaacagaagacacttgtgggccggctcagggatggacagtacctggccgctctccctgtgtgatgcaggtggcttgttctgaggtaggtgggcatacaggcagtgagtacatctccattgcagcgggggaaggtggatgtgggactaatcagggatggagagggagggatgctgcaaagatgcccgagcaggtgctgtcagtggggactagggaagcagtgtctctatccgagagtgcatgccggtggtaggggagcaccaacctgaacatggccagtaagaacacaaactagacctcccagattctcccgcaagtaaggagagatcagggactgttccaatttttggcgttcatattttttagacagttgtcttaaaaaaaatgcctgcttcacttgcgttaagaattaactaatcatggtccagacttatgctcaggtagacaaggaggactgaagccacagtgggctccttccaacctcacatcacatcttcctcatagcacctgtgcacccgaggtgcagatcctgatttgatggcgacctattacaaatttccttagactgcaagcaatcacactatacttaatagctatatttagtagaatacttagattaatacttggagagaatttaaatttaaatattatttccacagccaaaagacaaaacagcaatagacaaatgcattctctttttagttttcttcaacggatatatttcatttttaagcctatctaccccctcccccgatttgaagacatccctcgggctacgtggggaggaaagcctgtgtgactgatcgctgcagtgactgctcttggccatgactgttactgccattttggcctctctgaaaagtgaggcagcctaagcctcacagatatgtttcctggtcacatttttgttgtctctacagaaagagaagcaaacgatatcaccaaagtcctaactctatcctcccactctgtgaactacagaaaaggaagcagcagaagaaataatagagggaataacaaagtgacagaagcatagagggaaaagcagcaggtggcttttcatcaaggggcctttgggtaagatttacaggagacaatgttttctctgcgcctctgggacttgaaaggtcatggaaagaggactcactcgcgacagaattcaaacactcgtagttgtgtctcaaagtcctccgcggacatcaccagaaggcatggtttcaggggtgtttttcagaagggcgatggatttctttggatccacgtagtctctcttatctggttagagtttcttctttttctttttgttcttttttgacacagagtctcactctgtcgcccaggctgcagggcagtggcaccatcttggctcgctgcaacctccgcgtcctgggttcaagcaattctcctgcctcagcctcccgagtagctgggactagaggtgtgcaccaccatgcctggctaatttttgtatttttagtagagacagagtttcaccatgttggccaggctggttctcgaacttctgacctcaagtggtcctcctgcctcggcttcccagagtgctgggattacaggtgtgggccaccgcgcccggccttatctggttagagtttcttaggtgggaatggagttagcagtcccagaccaggccaagttaggacaagctgagaaatgcatcctgtggttgacacatggtgaggaatacccaagcaaaatactcttgtgtgaggcttagactctgtaagaatctaccactttatgaagagactttcttctcccatctaccagattttccaccaaatttgttgcagccttgttatgggctgaattgtgccctcttaaattcatgtatcgaaggactggccccctaggacctcagaatgtgcctgtgccctgtatttgaagacagggactttaaagaggggaaaagttaaactgaagtcattagggtgggccttaatccaatctagctggtgtccttaagaagagtgccgggcgcagtggctcacgcctatgatgccactgcactccagcctgggcaacagtgtgagacttgtctcgaaacaaaaaaggaggaaatttggacacacaaaaaagacaccagacaccagggatgcattcatagaggaaaggccatatgagatcacagcaagaaggtggccgtcggcaagacaaggaggaaggcttcagaagaaaccagacctgctctcaccttgatcttggacctcgagcctggagaactttgagaaataaatttctgccatcaaagccaccagtctgtggtactttgttatggaagcccaagcagactaatacaacctgcaggctttaaacgatgaacaagggatgtgactttattgtaggaccagtaatttgaatttcttgcaaacgcttgagtgtaagcattagtcaatagtcagtgatctgactggaaagaagcagagggcacaagttcatggcagtgtgctcaggggtacctggcccctctgtgaagagccccatagaagacaaggcacttgggccctgtctcaggggcagcacaagcttccaggacaccaccgtcactggtcacttgctgctccccactgtggccctggacagatgagtcaggcccatggtggtcagggcagtggtttctcctcgtcctcccccagcctgcactactccgtgcctggagctgtgaaaaattggcctttgctcgggcgcggtggctcacacctgtaatcccagcactttgggaggtcgaagtgggcacatcaggagctcgagaccagcctggccaacatggtgaaaccccgtctctaccgaaaatacaaaaaattagccgggcacggtggagggcgccggtaatcccagctacttgggaggctgaggcaggagaatcacttgaacccaggaggcggaggttgcagtgagctgagaccgtaacactgcactctagcctgggtaacagagtgagactcagtttcaaaaaaaaaacaaggtctttgctgcttccacagatgctcacatttctccctggctcattttaagctgtgctaaaatctggtaacaaagcttgcttttatttaaggtacattttgtaagttttcgggtggcccactgtaaggtagagagccctgctcttggtgacttgctttggaactagaaaattagcatctagctgtaccatatctgggcacatgactggggcttcatcaggtagggctgggctttcatgaagtaagttgcagctcagggcctcggcgtgcgaggagtgcagttgctgtgtgtgactggctctgtcaccaggagccccgcgtattcttcagggagaattttcaatcatgctggttttgatttaggcaatatggtcttgaaaatattttcatagtctagtctccatcaatcttattcttccacactgacatctgcttccagaatttggagtaaggcgagctgggaagtagggctctgaaatcttgaaggactgcctaagcccccccaccacacagaagcaaaagcagcctccacaggatgccagcttagcaagggaggcctcacgagcaattttaaggacctcagcactgatgacgagagatggtgtgttacggattttgcatctgcagttttgccattagtggcattttaggaataaataaggttgatatgttaactacctcaaaataattttcccattcaattagattttgttagtgaactcactcatcagtttggatagttcaagtagtatactgaaaaatgatagctaaacctggcttatgattagagctggtttacattttgccttcggcaagtggaggatttccctaggctgtttctggagcctcatttattgatgagcttctgtgccctactccaagaagcacctttccacctgagaatgaggggccccatttacaatattcttggatgaggacctggggaagaatgcaggagagccccaagctaagatggtattcaaactcagagcacggcagaaagttcccaaaaagatgttagaagtatggctcggcttgctgctgttttggcttttaaaaaaagattatagcaagaaccttttagggaactccacagccaccagtagggatcggcaggcacattgccccagctaaccactggagtggtgttcagggagggtttgggatgtggatgctgctccaagccatctgggagggagacaggtgcagggacagtcagcatgaaagcaactggggactgggattgccatagctcaacagcctgatgatggcctgaggttgttgccaagagcagctcctaggaactgctccttctctgagccaccctctgggaacagcagagctgtcagagaagatttaattgttttgatcttcctgccttcttgatatcccattgagagtcacccttcagggagaaggagatagagtcgtcattttgtattaagcaatgacaagaaagaaaaaaaacttttaagatgaaatcctgatgggattgaaaatcaattaatcaatcacacagacctctgattcctggtcattctggctcagaattacagacataagtgtgtgacactgtgttaccttagggtatatggacttttagaccagtagaattttatggagagaagaaacagtaaagatacattagttcaatgtatgcattagtgtttaaggtaataattttggtgcaaaagcagaatgggccagatagactagtttgccaggagtttatggatctaatgaaatagtttcagttgctcatttagagaaaacaaatgcagaaatagagaccacagctcttaatgcaaccaaagagagaaaatgcatgctgactaaacgtccacccattaggctccttattaacagaaatgagaagttattctttggggactgttgctctcctgctgctctgtcatggggctatggcttcattttccatctataaacaccaaacactggaaggttggttgctaagagaactcactggggaaacagttaactgttcaaatgtccccacttacgtggatatgtgcaaataccaccctctgttcagatctgcatgttgcagaaagacactacgtgcagtggactaaagctggacgccggagtgtcccacagacccaggttagcacccctgccctgccactcactagacatgtaactcacagcaagttcttaagaactctttcgaaactattcctcatgggcaaaaagaaaaggatggcaaagcatgattttttaagtgttcactgtgtataccaattatgaacaaattgtaaaatcctgcttcatttcatcaccatcaaaccataggcttaaatttgctcataatcccgacaacactgtgtgtttggaaacagtggaaacaggaagaactgagagcgggtctgcattcaggatccacgtggctccaatcataggtgtgaaaagactcacatattccgtagcatcataggacccatcagagtataacagctaagattattacacatgctgttccagtgtcccactcacactgcaccacagaaagctctgcagtggatcaattgctgctgtgcagtccccaacatccgatccttgctgaagtttattgattaagctggctaatacactccttacacagttatttggtaccatattgaaaatacattaattctaaaataacaaacaaacaataactttcaacctctattgctagtttgagaataaaatgctccctttggtgcagtgagtagtgctcatgagtgacagacaatttgaataagaaaactgggctcttgatttagatttttggctgtcaattacatttggaaagttgggggtaaggtacaagctgcttaggaacccttatttcttccccctgcccttttgatatcatttctctctcttctccttgaccttaggtgggtcaaggagttggaattcaaatcacatgagcaaatagcattcaaatgtacatgatatataaggcactttagcgatccaaaaaaaatttacaatatagtttctgtctcaaaaagtttattgccttgtttggggagacaaaacataccacacgaaaagttcatgatacaggatttaaacaagggctcaacaaatcatagaggaattgttatataacatgggttcttccattaaatggtaaaggaatgctcttagctctaaatactaaaaaaaaaaaaaaaaaaagagaaagagagagaaattcaggaactgtccaggtaggattgaggtaaaggacagggacgaaatgaactttttgagaagcatgtaggtggctaagtcagtttggatgttaggaactacactgagaatcaagagatgaggaagaccaagggcaaaccgaaacgagacaggctgagacaaagcgagatgagacaaagtgagaagagatgagacaaagcaagatgacagaagtttggtgatcatcttggacattttgctaaattaggtgaaaaaggagcaagaaacaggtatccttaggcaaaggcaacctctgaccaagcttgatgagggcagatgaggactgattctagcatgagagggaggtgcaggagaggcagctgcccagtaggtcctcagaagatggtgaaggcaccactccaaagagtgtagatacatactgaccacaacagagacagaatgtgtgtgtgtgcacacgtacacatgaacgaaagaggctagggcatcagaggggagaggaaatacagggagaagggaagtcaaggaaagatgcctgacattccacaggagaagcttctgcacaggagcagtggggataacaactccaagatgcactggagaggggtttttgctagagagtcagcatcgcaaacaagcagagtacctttgcattaaggtgcgatttaaaaatatgttattatctaggatagtggtgctcaaccatggcgattttgctccccagggaacatttgacaactgggagacagttttggttgccacagctggcagtggggatgggggtgctaactgccatcgtgtgggtagaggacagagacgctgctgaacacccagcagcacgcaagaagatcccacaacctggctccagatgtcaatggcaccaaggctgagaaaccaaatttagaggatcccagggaaaacagaaaagtatcttaaaaataaacattacccagtattgtacagttgacaaatgttaacattatgcatttattaaaaacaaatgtaagcaacatttattactgtagttagaattttaaaatatgtacatatactgcagcagacttttatttatttatttatttacttatatgagacagagtctcgctctgtcgcccaggctggagtgcagtggcacgatcttggctcactgcaagctccgcctcccgggttcgcgccattctcctgcctcagcctcccgagtagcttggactacaggcgcccgccaccacacccagctaattttttgtattttttagtagatatggggtttcaccgtgttggccaggatggtctcgatctcctgaccttgtgatctgcccgcctcggcctcccaaagtgctgggattacaggcgtgagccaccgtgcccagccctgcagcagacttttaaaaagatatattcagcttcatcacccttttcttaaaaaactgaaattacttctgtcaaaatcatgccgatggaaagcaatgacatgctaagcacagtcctttacagaaataattcagatagaataagtggaaaataaccttaaagaagattgaaagaagcgacaacttaatgaaacccagctactggttccattttctatttatccttccaaattgctaatgaattctgacccatttagtcatgcaaaatatatatcctgaagaatctgtatcccttttgaggtacttaatggatgtttagccggcaaggaaatatggcatgcctattattcacaatagttgatctttaaattgacattaatatgccacacttagagtactggggaaattctagccaaatatacaaagccgctgctactaagatgaaagacattccacaaggaggaaactgatctcagaaccagtgaccacggccatgagggcttcgtggctgctacagcacgttagccataaacaatttccatctgaggaagtgcattcagtgcagctgctgatgcatagtaaatatttgatcctaattggacctaatgatgaatttcaattctgtattcaccattcttttataggacaccaacccataaacacaaaaaataaaaaaggttttggggaacatttttcatttccttaagtcatttaataatgatgaattgcctgggaggctctttgaaaagatagatgcggctagaaagttactgggagaattagaaattgcataaggattcaatgcaaaatactttgtaaaaagaaattttaacttccttgtttaacttattttaattcattgagaaattaaaggtaaaatatactttataaaaatataatctggcaaactttaatttgggtaccaatttggaattcgattaaacaggttcaagtctatttttatagattataaaaatgctcctttcagataaagtaaaaaagataattttgttttgggagttaaaagaatcaatgtctgtgcatcctttagtctcaatagaataactcttattctatcagtaggcagaaatgtttaagcagcactgtccaaaagacatacatgtaatttaaatgcttttaaatggaatagaaaagtgaaattctctggtgttttttcttgtattctttcaaaatcatagcaccaatggatgtgagtttctaacattattcacctatctttttaaaaatttacccctgaatgcttatacactgctggtggagatgtaaattaggtcaaccattgtggaaagcatttggtgatttctgatagaacttaaaacagaactatcattgacccagtaatcccattattgggtctatacctaaaggaatataaatcattttatcataaagacacatgcacgcatatattcattgcagcatcattcacaatagcaaagacatggaatcaacataaatgctcatcaatggtagacttgataaagaagatatggtatatacacaccatggaataccatgcagccataaaaaaggacaagatgatgtcctttgcagcaacatggatggagctagaggtcattttctaagcaaactaacacaggagaagaaaaccaaattctacatgttctcaagtataagtgggagctaaacattgagtacatatggacacaaagaagggaataacaaacaccacagcctacttgagggtggaaggtgggaggaggtgagggttgaaaaactacctatcaagtactatgcttattacctgggtcatgaaataatctgcacacaaaccccccataacacacagtaacccccgtaacatgctatcaatctatctatataacaaacctgcacatgtacccctgaacttaaaataaaagttaaaagaataataaaaacagaaagtttacccttgataacacgttttatgtataatcactaaatctactaaggcacatttgcatattatattatagagtctgctagctctacagtttttccaactgtgtacagtcggccaactaccataacccacatcttccaaatcctagtggcttaacaatggaaaatggaatatccagtgcagctcagtggagtgtggggtggggggctgtgttccaaacagccatttagaaatgatgctccttgcagctattactccaccataccatggggtctcacagtccttcacatcccctgagtccagctgttagctgagaggagcgagaatgtacaggatcaggtatgggtttcatgaggcagacctggaagggcaatacatcacttctacgagccagaaattgtcacacgattccttccaactgcagaggaggctggggaatgtaatctacctgtgtgcccaggaggaagggaaatgggctttgtgaaaatgtgcagcattatctctgacaaactggcaggaaaaaacccactaatgtcatatctttatatacctgagagatgtatcatcaatgaccaattctctgcccttggcagaatgccgattggaaatatagctttggacagggccaatattaggctacgtcaagatgaccagcatgtgtcctggcaagctgacaacagactctgtcaaacagtcagcatggccagattaccctcctggtcttccaggcaatcatgctcctcttcccactttgggactgacacctttgcttcccatcgcaagcacagccaattcactgaaaagagttgactagtgtcacttgcattttcatctgaataagggaagagtcactgtcacttggaatgtgaccatagactccactatccttagactacatcaaaattatgctcctttaaactatttggaggtaaaagacacaagaaaataataggcaccagaagcatacacaaatgtgagatgtttggcatggaagacagttttctactcataaaatacacaacttgaaagttggtataaatatcagatcctgaatcctgccagccacatttttactggcaggcatagcaggagacagcacaatgaaaattctcatagaggttggaagtagcaacaagtcttgaaaactcatttgactatcaaggagggctagaccacacattaactcagaccacaaaggctaaaggtctcacttagactctcttatcactcagcatttagaaccagaagaataatcacattcattctttcaagactttccctttaactatacataagaaaggaaatgtctttacattcctcatatctcacttggcataaaatctaatgtttgttcatctcacttatcttaatcccatacctcctcatgtttattagaagaaaaaaatgtaactctgcatgtcagaaaacagatctgaagtaaatatcagttaaaatgcaaaacaaaaagcaaaagaggtctcagatttttacaaatgttgttttatagaaaccataaaattgaggtaacttgatttaaaacaagtgaagacatccaagaattttcatagtatgcaagtgatctggactggtggttggcagcattgacattaaatcagctgaattttcattgacagctcattagaaagatgttccaagaaaatcgaatacaagatgctcaacagaagctcttctctatgcagttcataactgttattttatgtccttacaagtcatgactcatattagaacacgtaactctgtaaaatttaaagatttttataaatcgcatgaaaaatttccccttagtatagctataattttgctgtttatgtcacatggatttttaattacattttccaaacacgaaggcagtcaatttgataaggagaatatttcacaaaattcactcttctgttctaggatcttggttctaggtaactcattctccagaaagaaatcatatcagtcagttcacaaaagaaaaaaatatttaagccacctaaaaactcaagtactattcattgttaattttgtctggatctttacattaccttaactatatggtcagtctataaaaatgtatctgtacatatgcttacaggtaatatgtaatataagtaacatccagggatggatcctgaagcgggcttccatttttttttggcatttgtattttaatgaaggttaataaaagccaaattacagccaactgttaaagctttttttttttttttttttaattctatggtataacaaaatcagttccaggtttttttctgaacaaatgatcctttggtctttcccgtggcatgctcctaaaacaactaaaacaaccctctacgtctaatcagtcacctaagatatcgagtggcaagtctttcacatttgctgcttataattcctgaatggtccatattgagtattttcatttctgggtaagggaaaaagcattttggtccattaattcacccgctcgctcctggaggacgttaaccaattctgctatcacaaagacgtgagtggcatcaatgtcttgcatgatgaacttcgcaggcttccatttttgttcactttgggatggttttcctgtcgaactgcgtggaaaagcaggaagcacactgtccactgtaggggttcctggtccagcagaagactttcagatattgtcaagtttagtccacttctttggatctcagtggcttttattctgacataagatatttagatgttgcaagcccctccaaggaacactattttataaacagaaacatccagttgtgtggccatttcataattagcttctgaaatggacaggaaatgcacctatgtgaaggaggcagagcagggcaaatgcctttactgcttttcaaattttgatttccgggtaggaaacacaactaaacctcctatcaatttttagtctttacctgtacatttctaacttttagagatttctgttaatgttcctttttcttgttaactttgtatttgatattcaagaaacgttagaaatgaatgcctgtataacataatttcaagatattaaaatagcatttatcattaaggccacttgctttataccaacatcacaattccattttaagagttattccatgtcctgggaaattaaatcactgtctcaactccttccaggtgacataagaagacatggaggcatgatggtctagcagagagaagcctaggtggtatggattgttccatgttgtggaacatattacagagacaagggtatacattagttcagcaatttcgagttcttaaaacatctgctttctctccagctagatctatacaactggatggagaagatcaggcttaggtgttctgtaaaatttaaaaatgagacccctaatggcagctttcctattttactcatatttttggaatattttcaagcaattgctgatacaatctggtgagccactgatggaattgagtgtaagaaatggaaactgctatggattgttaacatagagactgatgaccagattacaggtgcatatattttgtttatctagagttgtgtggaggctgctgttcagagcattgctgacaccagggcatgaaactagtgacacagttaatgaggctggtgatgaagaaactctcgggtcctaaccgataatttcacatacctagtaaatcagcattatttcatttgagttacacttgactttttaaaattaaatatcatgcgaaagactttccagaattacagcattccaccaaattgctctagccaggaccccattgaggtccatattgtaaaattatcaggttatatctaagccatcatctttcttgattgcacctccccctctgacatagtttcttctcttggctgtcagcacactgtgcccgcttgccttcctcctatctccctgggcatgccttctcagtttcattgatagggttctcctcctcctcctggcctctcaatcttggaggtttttagccttgaagtttcttagcctttttgtcctctttctgcactcactgcctcattcagtctcaaggctttaaacaccatggagacccagccatctcttgccgtctcctccatttccacccattccaggcaccttccttcctcacctggccgttgcaatagcttcctaattagtctccagcttccaccttccccttcttaccacctactcccttcagtgcaaaagcctcaacctctggcactcaccctttctttctcttggttgcagctatcctggcctccttgctgtgcctcatactggaaggccactcacactttagggcatttgcagaggcagtgccttctgcccccagatgggtaaccctatgggcaacccccttcaacttccttgctcaacatttgaaactccaagctgcactgtcctcaacacattctccagatcctctttaccctgctatgttttgagccccttttactctcttacctactgtataatctcctaacatgtttaccttttactgtgtgttctgcccatgggaatttaagctctgtgggggcagggatttttaccaaggttgttcactgatgtgtctcaagcgctcagaacagtcctttgcctttggacagtgctcggatttgcatgagtgaatgactgtgctctctccagagtgatgaggatgtcaggattgctaggtttagaaatgaagcacatcctatagtatgacagagcctgcagaggagataacagcttctcgcttaaagatatggagtaggcgttaaaaatgatttctgcccaatgtaagaggaggattttccaattaccaaccagaaggagttgcttgctcttgcctcagtgattctcacaataccatatgctatcaagttccattgccctctttgtacatgtgagggtaaggtgctccattggatgtatcttgaaacagaacagagtttgtgtatgtgaggggggtgtgtacctttttctaaggattgagctggatgacaaaggatattgcatatttaacgggtagggagaacgcaggtgcaacaattcacaaaaatctcataatagtgaatgatggtgaatgaatagagaagacctaagaaatctctcaaacgggtgagttctctaggaattgaaagggttttttttttttctgttacagttttaaaagaatgtggaaatggaataatttgatgatattaagctgtggttttgatgaatgctctaagaatcatccccagtgataaatattcaaagataaatggtgatgttttagatagaagtcaatcgttattctattgcctgtaacagggttccttagttataattctgttagttgctctcatggtcttatgttactaatatagtcattatttcaaagcttatcacattctgtaaaatcctgtagtcattagcaataatctaagccaacgttagcaatccattaaggttagacatttaacttctataaaatactctatgccacagcactttcatattcctatggggcaaatttccatcgtagactccacgttggctccttgaaatggtgtgtactcaaggatagcccagcttaggggactccaaatgccatttcaattttaactttatacaacagattctcgttctccatccatgcttagacttcccagctctcaggttcaactctcagatcaggaacaaccatatgtactatgttttgtttccatcgaattggcagtgactcattatttaattactctccatgtgttggccaaatatgaggaaagaatactctgaaaaattaacaaaatgtggctggcattacagccatgcagtgcctcatgcctgtaatccctgcactttgggaggctgaggcaggtggatcacctgaggtcagaagttcaagaccagcctggtcaacatggtgaaaccccatctctactaaatatacaaaaaattagctgagtgtggtggtgggcacctgtaataccagcttctcaggagactgaggcaggagaaccacttgaacctgggaggcggagattgcagtgagctgagatcgcgccattgcgctccagcctgggcaacaagagtgaaactttgtctcaaaaaaaaaaattaacaaaatgcatctgtataggcatcctatgtctgcataatgcgtctacacaggctttgggatgcagcagcattggatagaacaatactgatccctggcaaagatacaccacaaaaaagctcggctgcctttcacaaatacgagttcatgaacacgtccaggaagataaaagtgtgcagtgcattaaaaacacatttccttctcattagttgcatgaggatataaaaattaaatcaaatctgctttgttgccaatttcaagaatgtgactgaggacaaggagcagaagaaagcagtgtcaccaatcctactcggaataatctgtcaccatgttagcagagcagaaaacatttcattttaaatgattgctatttcagttacataataaaagttaatagatacaaccccaaacataagatttaattcattcagacacacatatacttgtgttagtctatgaaggaaatatatcttttatgtcaaaattatgtacttctttgaaatgtagttcaaagtgaagaagaaaactttaaacattttccttcacttttaactccttccatgccccaaagcaaacacctgaacatatgttaaaatacttgaattcatagctgccatcagtaatgtctttattcattcagagattttacttcaatatccctctgttagactttttcctgaatgttgatcttgaaaatctgtaccgaaagcttaagtttttctccaaagtcacattcaacttccatagatcatatcagaataatactcctttgatatttacatagaagcaaatacaacaatatctctataatccatggataatgtatatatgctactatagatagctctcattctgaagatatttttcccaaggcacaaaggccatcacataaattcacctgcatttttagagtggatgttcagggcgatgtcattggagaaaggctatgctcccagtgactgtcacggacaagtacagagtcttgagtaggctctcaacaaatgattgttgtgcttattaattgaagaagaatgatcttatatgtgaatcagaaaggaaggaaattaggagtaagtgacaacgaagcaagtgatttgtgaacattgtgtccgaaagagaatctgaggaaaagggtgttttgaggttagtagcagggctgacattgaatctgagttccatgcccagcagtgagccacaccctttccttactaaggaatctggaaatgttgccagccctgccttttatctttgaaaacacagggctatttatgtctaaacacaatgcactgaatttaccttcattggttgacacagttatctttcctgatcctcaaaacctcaacagacagcaaagtgcacaacttgctatgtaatagaagtttggtagatgggaagtctacatgcaaagctgatttattttggcaagataactcagccgcaaggggttacacggaaggcagagagaatggatgtaaagtgtagtcaggatactactgagaaatcctagtcaaggatgttgcaatagcctgtgaactaggaaaggagtgatattgaagacgtgtatgtaagtagaatcaatgagtagggactaagttggtatgaagaaaaattcgaatgcttgtctaagattctaattctcagtaactgggtggcaccatcgtcaagatccagccctgggaaggaagagcagggtgggagttggaaagtgagttttagacgcattgaatttgaggtactcagaagacattcaaagggaatgttcaccagcttcttggaaatgtgagtctggaactttcacaagagatcagggatagagattagggattatcgtgaaggaagaaacaggtgaactcagggaagattacagagatttagacgagagggacagaacccaagggagtaactttaaggttgggcaaaaaaaaaaaagggcacctgtaagtggaattcagaagatgtaatcagagagactgaaggtaaatcagaagcttccagtgtcacagaaggcaaaggggaacagatttcatgaagatgcgagagtcagcagcatgtaatgccagtaatctaaaagacttgtctccacatttgtttccaataccgctttatgttaattatgtaatatctggtttctcagctttagtaacaatgacatgagaaaattcaaaattattttttgtgtcatttctctcagtgtgtttattattatttaaatatatttatatgctttcatgaactttacttatgaacgagttaagaacatggcatcccaaaatacaccactctggcatattcagtatttttagttaaaggcacttaagaaaaaccaggtgaggtcgggcgtggtggcttatgcctgtaatcccagcactttgggaggctgaagcgggtggatcacctgaggtcaggagttcgagaccagcctggccaacatggtgaaatcccatctctactaaaaatacaaaaattagctgggtgtggtggcaggtgcctgtaatcccagctattcaggaggctgaggcaggagaatcacttgaacccgggaggcggaggttgcagtgagccgagattgcgccactgcactccagcctgggtgacagagagagactctctcaaaaacaaaaacaaaaacaaaaacaaaaagcaggtacaagaagatcactctgaccttccttctgtttctgaaaagcaggagatgacattcccatgtgaaaggtgtcctcccttggccaggtgggaggcatgattcctatgggcaaggaccagaagctgaggctgagggaaacctgtaccacctgctatactggcccttccttcccagccattctcctccaatcacctgccctggcccaagcccccgaccccccacctcatcacatttctgcaatttactgctctttgtctaattccttatataagtggtcaatacaaactgcatctttgggtcttcacaaattctgaaggttttcatgccacataaacttatattaaataaatgtatatgtttttctcctgtggatctgtcttatgtcaatttaattctcaggcacaacacccacgtgccccatcccctaacaaatcctaacagaggagaggtataattttgccttccttacacctagaaacatagaaaccatcttttctttgaatttaatgatttaaaattataaagacttttggcttgcactgaattttcagattacatgtgaaattacttgtaaagaaaaattattcaatattatccattttgtcaaaactcttaaaaagatagtgatgtctaccagctttcgcattttagcataattggaatgagtctatggataaaacaaatagaaaaaattggaataaaaatcctcaaaattaagcactggttcctgccaaatggtaatgaaaagtcactagctttttccaataacattaaggaagtataaatattattaaggaaaagctgtgtgtatataagcttttctgaataaattaaattacacgaaatatataagctacagaatgaagtctttatattaaaaacaggtagtcctattttgcctggtatcgtgtcaacaggaaactcaagcatatccagccatatcactgctctccatagtcctgtagcaactgagaggactgcttgtctgttttactcacttttcatacatttattacataaattctcttaaaacagaaatcctttcttctcaacctgttgacccaaaaccagtgttaaagaggttaagataatgtatacactgctagattcaaagcccattataaattttcataaaacataatgacaaactatttgataacttaaagagtaaatatcagatttataacaatgccatacaaaaagatacacactacaaaaaccatcttgaatgtaagtttacaaaagatgtttgtctgctaaggaactaaattcattttctctttgaattcaccatttatagaagttttgagccctagaccaaaaatatggaagtataggccaaacattatactatctgtgataaattttcagaaaatttgggctgctttaagtaatgtatttatgttttacatagttcctcaatgttagcagctgtgaaagatatttacaatttacttcctatgtagaatttatcttaaatttaagaaatagcaaatagagggaaagatgttttaatgcaggtctttattgagtcgttcaaatgatgaagagaataatataacaaatgtccatgtacccatcatttatcttaaaatagaagatactaattcaattaaagcctgctgcacatgtctctaattggaagtgccttcctacctccagaggtaaccattatctgaatgtaatatttatcagtccatatatttctttacattatgatgatgtaggtttttaatgaatactctttttaaggttaaagtaattccttcctttgtctggttgtgagtttttatcttgaaagcctgtgttgggtttcatcagtttttttttctgcactgattcagactgatctacagtcagaatgtaaagttttaaaccacaaaactcatatgattcatatatggtggtgaaatgccttcaataaataaatgaagcaatatgaaaagaccctcatgaaaatattttattcaatgaaaatgaaattgctttaggcattaaaagtagttatctatggtcacctaaaacactatttggttttactagtgaattcctcatttccttcctttctgatttatatgttagataattcttaaattaataagcacagctgagggttaaacataccaaatagtcttctgccaaatgtttttacacctgtggttttaagtattttagaatattgattagaaaaattatacatgtgaacataaaaaattatgatgtggacacaaatgatttttaacatcaaacgttttttaattttgatatccaaaatacataaaaaattgtaaggggataaaaatctcactgcaatcaagctttctcacctttgcataaaaattatcactttgatttcagacaagtttttacaagctgtggttattaagaggtggatctcaccatgtgagacaaaaaaacacgtgtgtgccaattctaaattaatttccaaatatgaaatacatccgttaattcttaaagatgctcaaacacaaaataaaatatattttgaatgtagacaagtaggcatcatcaatttttttaccacagaaaaaggtagtattttattactttttccacataaaagtctacctctgaatttaccttttcactcggcttttcatttttacttgtttttttagttttccatcataagccagtcttctattatatcaatacaaactttataaacttgtttacacttaatttttgtcttattctgccttgaataaaaatagtcatagtggatataaaaagaaaattctaatgatttaatttgatgtcagaaatacaatttttaaagaaaacatcgaatttctgctgctaagagatgtcactctgtaagttttctccaaaagggagtgttttactgccctttacaaacagagggaaaaaccattttctacttcagaatgaggcgtggatcccttagtctgacatctgacatccttcttgaatttgcactgaacctccatctttatctccaacaattcctggctgagtcccttcactatgggcctactcatagatgtgcacagaaatgaaccatctggtgtgccaggccacaccttccaacacttggctctgctgggaccacaaggatgggctttctcatctcaccgtacatttagatggccatattgggtttcggatagtctcccattcttaaccatggtcttcaacagtttttgttttaaaagtgaatactcttatggtaaaaaagataaatgtgaaatagaaaatactgtagatctacagatcaaagttatatttgaaaaccacatttaattgtatattcacatatttttgtaattcacaaaaaatatacccatctgtaacttttcaacattcttgagtgttttgaaaattaacaatttgttctaaaacttgagagttacatagttttgaaatatttcaaagttcagttcaaacacacacaaaactcctggataccacctggagctaaattcaataccaatcgaattttttaggtttgcaaaattgaactaaagaagtaccactgagttgagggcatgtcaagatctagcattaaaccaattcagatttgtacttggaccagcatattccaggggtcacagtagccaacatgcaatgccttaaaaatacatgctgtacgtgtgtttttctattaagctaaattcaatctctttttttttcaggcataaatttatttgagaacaagagaataatgtttctattctatcctttctaatatcaagctggtctttaaaattttttttaaactgtgtcaatttcctaactcgattcttttcggtatgccgacaggttatttcaaccagcctcgtcctaacatttggctcattatactattggcacattcatgtctttctctgtaatcttcacctcccgtgcttgtttttctctcagtgaagtacagaaagccaaaacttaggatttgaaatgtcgtcttcactgcctggaccaatggttttcttgttttattgaaaatgaaagagctggccgggcgcggtggctcaggcctgtaatcccagcactttgggaggccgaggcgggcggatcacgaggtcaggagatcgagaccagcctggctaacacacggtgaaaccccgtctctactaaaaatacaaaaaattagccgggcgtggtggcgggcgcctgtagttccagttactcgggaggctgaggcaggggaatggcgtgaacccgggaggcggagcttgcagtgagccgagatcgcgcccctgcactccagcctgggcgacagagtgagactctgtctcaaaaaaaaaaaaaaaaaaaagagaaagaaaatgaaagagctatgcatttggtgaaataataaaaacacaacctttcatctctgataatactgagcattaaataaaattataggtgcaattattttacaggtaagttttactttctaggacaaagtctagatacacagggcagtactgactgccccgaggcctcggtctctgcaccaattggtctcatcttatttcaagtgctctcgtctttgtcctcctcttctcagttacatctgtgtaacagggtctgtccagcgtttcatttctctaatcaccttgaacattgctcagcagtattactaacacatgagcctgatggtgagacttttgttctcaataaataaacacaaactcaatgcaccttcccaggggctttgcatgggacctaaatattctttgagtcctgagttttctctcctctgaatctttgctgtccatcaccttctgccatttgaataccctcttatccaaaccaaaatcctaattccagtacagcttttcctttgtgataataccactgattttctagtacaatatacgcccagctcccaattccagctctgagctcctagagttctgggggacttcacattgcccatcttcttttgcagagtgttatatccaggtgtatgtgcccagctctcctaccagactgttcatctgcctgtggcacggctccttgcacacagtacgtacaaggcttggtaacagaatcccatgttcattgaagggcctagactgatcacattttaaataatgcacaatgttctcacgtctatttaaggaagaaacaactgatttctatcttttaagattgcatttcaagaccatatcaaaggctttgaatctctcaccaagactaacaatgaaaaacaaatttggccaagtgcagtggctcacacctgtaatcccagcatcttggaaggccgaggtgggtggatcacttgaggtctggactatgagaccagcctggcagcctgggcaacatggcaaaaccccatctcttctaaaagcacaaaaattagcttgcgtggtgacacgtgcctgtaatcccagctactcaggagggtgaggcacgagaatcacttgaacctgggaggcggaggttgcagtgagccaagattgcaccacagcactccagcttgggcaacagagtgagactctgtctcaaaaaaaaaaaaacaaaaaaacaaaaaaaaatgcaaatttgatcatatttaattgaatttgtttcaaagtaagggaaaggggagtatgcaagggcgacatgtggcctgttcttctgaaaaagcaagaaaggttatctttatacaccagatcaaggtattgacagctacagagtgaaattccatacacaaaaagaaaattttcttcaagtgaaaaaagtaagtggccaataaggtcacattcaaaaattaaaaatggatgccctggtcttgattactgataccatttttcaataaaagtaaccagagctccttgaagaaataattgattttaggactaggacatgaaatgtacaaaatgatgcgggagcatcttgtagtaccagggaaaaaaaaaagtcaacccttagcatgaaggtgtaagtcaaaggcacatgggagactggagatgcattttggatttcagattttttcagattttggaatatttgcatatccatcctgcgtcatcttggggacaggacccagatccaaatgtgaaattcgcttatgttatatgtagtgtatccaaatagcctgaaggtaattttatacagcgtttttaataattttgtgcataaaatgaagtttgtgtacactgaaccgtcagaaagcaaaggcatcaatatctcagccacccacatggaaaatctggtgttgtttggcatcaccatcattcctgactgaatttatttgctaccaataagcaatcattttcctgctcttactcagacgtgagtacttaacagtagaaaatactactatttttgtttttgaaagagtcttgctcttgttgcccaggctggagtgcaatgacaccatctcggctcacggcaacctgtgcctcccgggttcaagcaattctcctgcctcagcctcctgagtagctgggattacaggcatgcaccaccatgcccggctaattttgtatttttaatagagatggggtttctccatgttggtcaggctagtctcgaactcccgacctcaggtgatccacccgccttggcctccgaaagtgctgggattgtaggcgtgagccactgtgcccagcctaatactactattttttaaacagtaaagatacatcctattaatacagtgaaaaataatgtgtttaggtaactgggcagcacaggaaaaagaccgttttcctttctcagctgttagacaacagcagcaacaaacaatgcaggctttcagttgccacctatgatgctgtgtttggagtaaagggcactgtacactgtattttttttcttttttaggtgataagaaacatctgaagcagttgacagatcatgaagcgggtcctctgagaaatgagaggcattctgccggatggcatttttttttttttttgagacgaagtctcaccctgtcacccaggctagagtgcagtggcacgatctcggctcactgcaacctccgcctcccagtttcaagtgattctcctgcctcagcctcccgagtaggatggcttttaaaatgttttctccagcgtcatctgcctcattaacagcgatttttgtcttagaagtctctctttgagtttctaaatggacatgactgcttattctgttaggaatgcactccactctagtccttcaattagcccatcacattgtcactgtggcatctgtatgcacattttctgccgtgttaatgtcatcttcattgtccaattgtggcatcatgttggtgctcaaaacgttgcagattttggaacattttggatttcggacttttagagtagagatgctcaggctctactacttcttatttcagagaaaaacataatatccaaataactaataaaaacttggttggagaatgcagacttctagaaatgactgtttaatctgcttatgataaataatcctctttgctctactgcaaaggggagactactgctgttactgttttgtgtcatcatgtcctgatcagacaaacactgatttaaaaaaaaaataaaacaagtacattgtatatgtaaatttagactgtaataatatatccttgagaaataaatattatatggactccatttttctctgacagtcaattaagcacaaaaagatttttaaagcactgatttttgcattcttaaatgacaaatgaagtcttcttgaaataagatttttaatgatttagagaaatatttgcacatacactagcttggtgttgattctcaatttttaatttttttttaatcctttccctggcattttcatcgtttccttttttttttttttttttttttgagacagagtttcactcttgttgcccaggctggagtgcaatggtgggatcttggctcactgcaccctccgcctcccaggttcaagctattctcccacttcagcctcccaagtagctgggattataggtgtgcaccaccatgcctggctaattttgcattttttttttttttttagtagagatggggtttcaccattttggtcaggctggtcttgaactcctgatctcaagtgatccacctgcctcggcctcccaacgtgctggggttataggcgtgagccaccacgccaagcctatccttcccctttttctgttttgttatggatgatgaatgtcttaaaactactgaactccttataccttgatatggttagtgagagcttccttgtgggatggttctgaatgattttctctagaacctccatttgaacatcttcctttcctctgctcactgtaccagtctggggctatcaaatcacatatgctgataaatgctacactatgactggtgaagccagtgctaaaaagcagcttctacatatggcacttccaaattgtgttattgctagcttttccagtgctttctctactagggcatccactgcatgtcacctgctaaaatgcaaaccacatctttaatgaaagtctgttttattgaatatataagtgactatgaaatttcaaaatgaaatttgatggcaatttaattttataataaatctatatctatgtatctcaccaaagatagcctaaatctttagtgaggccacacattcatttttatgaaaattcttcacatgagtttagaaatctcccaactaagaaaaggacaagtcagatcttagtgtcctgggtggcttagcatttcataactgccagagaaccatgaggaccttcctgggactgactcatgggagttatctgcaatgattttatgtttcccaatgggtcatattttcattggagattatttactatgcctggaatcctaatgcttggtgtctctaatgagaaaaataatacaaaaaaattcaatattcagccaacacaaatttatatgatctacaaaagaaaggaatgttttcagatcctgggcttgattatttttgttttcgatgtgacagatttgctgaacaaagcttacaaatctcccttttcctctctgctcgctactaccccgacccagaaaacacacacacaccccttcccaaccggggaccatctgaccgttcacacccacatcaactctgggtcgccatgcttttctgagggacattgccttcactgagagctcctttattctcagtataccttacattcccagccacagtactgaacttctcaatgcttgcaatgttcccttggagtatatcagttgagcaggcggaaaaaaaatatctggaagtttattatttttccaccaatatatttgacaccacctttggagagggaacaaaaggcatactgtcaagcggatagacctggacaaaatgttactgtttgttcctcacgagcacagaggtatatttaagcaaagaaaggcattccacggctctcccgggacttccttccttcagctgaattataccaacatgttcacaccactgagggccaggctgctggaatttaaaacgcagacctctatctgccagtgcttcgatcccacggctacaaacattcacattaggattgaacctggctttcaaacatcatgagataaatgggagtttactgggggaaaacgtgtgccctcatgaaactatagtagaagatgcggaaataggactgtccctgttcagcagattctatactaatacaataaagcctcaaagtcaccagaagtcacctggccttgggttatgtttcaaatccaggctcactgacattcatgaaacctttggcaacacaggccaagtttcgtgcaaggctgggtagaatacttctttcatgtggaagctgggtgaaactcggtggctttggctagctttcacctgaagtttcacattcaaacaatccaaagtttcaacgtaaaattcaggggtgaagagaaacagaaagaaaaaaaaaacaaaacaaaacagggggaaaatggcttgcctgggaatggaatgatcacctaccattctccaaaaagatttcatcctggtgccatttaattttgccgctggactatcacctctagcaatatatttgcactcagccctgcagaccaaggcttcccagtactaagggagagtgagtattctagctagacgcaccccatccccccaacaaagcccaggctcaaaataacgggaggatttaaaatggtaaccatacacataaatgcgatgattgacatgcttcttataatgtagatttgaaggggaaaagtggcaatgaaatgcccaggtttgggaaacttaaagattagactgaacatctctaggtttttctactataaatccaagttctggagattcgattgcatctgctcctaatccagggagatctctgccgtagctttctccacagctccgcccctttggagatttgtcctgtggccacttgcgtttgtccttcttagcaaggtgcagaggacggggcagactgcgtcagcgctgaggagctagcgtccttgactgggacttaaacagtctcctgacaggattaggctcattctactcctaaccttcaacagaacacgcagggaccgtttgccagggaacgtcaaactctgtatttggctgaggactgtgaaaataccttgtgcttggggtgggaaagaagaagggaacaaatgtcacacacacctgtgctttcttcacaatgaagagaatattccaaagctgattgaatggctagtaagtgctacattttgcccattttaggaaatacatttttaagaaatcccttatcccttacacagcagaagtttcactcgtaaaacagacttctggctactaaggttttttttttttttccagttttcttttgattctaattttctttttctttgttatttcttcccgtttttgttactcagacgatccttatgtggttaaaatgcatgctttcctttgatatgtgctctgtgataccaataaacttttctgaaaaaaaagtatttctgaactccaaagatttcagcatccatgtttttaaaaagcaccagttgggccccaaggcacacggagattctgaggcagcagggcagccagcgcggggctctgtgcactctcatttgctgcttgctcttacacatctgccagacaggggccatgaactgtcctgaagtctgtgttggggagaactttaccagagaacacttttcttacaattgggggtccctctagaagtgaaatctaagacagatcagtgaggaaaactaaagctccaataaattgtttaaaggaaatgctatgaaagcattaaaccaaaaggaaaaaaaaggagactttttactgagcatagtaaatagccacaatcaaagtaaatgctgtgtttgaagttaaagtccacagatcaaagtacttcgcaaaatgtcaagtgcaagcgtaacgagggggagaggggagccacagaaactgacccgaagtatcacattgtcacgttagagaaacctgccagcagatgtacccagcaaaagacagtcagcttagtaaggaatcctcaacactgtcccctaaaatgtgctaggaacatacaaaacaacaataacaaaaacaaaacccccagattcccccaaatcaaccactctaattccacacgagcaatgaacgaaacagtgatgaaaggagaacattatacaatacggctcgctcattgcccttaaagaacaattacttatatatattatctttactcaggtggatggttgcatctttttcctctttttttttttttaatgcccctggaaagttaaaaataaagcagtctaaacaacaaaaatatgatgtctgaaacatcctctcattgctctggcaatcaggcttaattagacctctgatccatggcttagtcatagtcaagcgtgtactgcaggtcactattatgagagctttaagcaaagtttaaaacttacagccacaaaaatgcccagatgctcctgctgtattctggaacaccgtgtttacctgaaaattgttcacaactccccttattattttcactataagtaagttattttaaagacattagttatgaacataccagaaaacaattaaataattccagaataaaaaatcttacctacaggcagctgagttcaacagttgctctatacagaggaagtaggagtcagtggccttttacatgtagagattgtttatttagccctttttaaaaggtcttgaactccagaggtttaagattaagtccaatccaagtgtctgaaggaaaaaaagcaagagagaggcaaatgagagagggaaagaatcccagctgctgggtggtgctactgttctgagagcatttgagctattttcagcattaacagcagccggggttgtctgcaaagggatgaaaatgccttgcccagatcgccaccccccactccaggggggagaaaacaccaaccaggaaacccacaacgacttggttcattgtgcaaatattcatttaaattttgaggaaaactgccagcaccattgaaaacaaaacaaacccaaagttgactggaatcttaaagaaacacagtgctcctcaagttttcaaaatgaattacctgattcactgaaaacgagatgtcctacttatgctttattgagaaggaggcttttcttctgatatttcctagggggtcttaagaaatagttgagagccctctggtagcagtatctgttgtcagtctattcttaagactgaagacaaatgatttcttaaaagagcccgcacctaaatttccagtttcatcaactatgctatttttgaaagctactgggttaagcgttgacatctcttatctattggcagagactggggaccattcagtgacatgaggcagacaaacagtgacccctgcttctgcctccacaggccaatgaagaaatcattctggttgggtcactggcaatgactgacaaactttgagccttcattttgtttctagaaataaaaattaagaagtcgtattcattcattcattcagcaaatatttatttggtgagcacttcagagcttactataagccaagcactctgggaatacagtggtgggcagaatgaagtgtccttgccttcaggggtttagagcacacagatgcagtgagaataaataaaaacagaatttttaaatattttccagactttttcacatgatgagactattcacatcatggcagctgaagactgagatctctttctattgtggatgaaggaagatactgtgtgtcatcagaccaacttcaggcttccattgagtcattgtgcctttacaccaccaccagggaggaaaattacttactttctaccaaggaagcagttaagtatgtttatgaacgctttcattccaatagatgaaatccctggtttttttcaaccccctactccccattacaaaaagaatgcttaagtagtcagaaagtactgctgagaggctttccatcgggagatgaaaagagagtcttcaacctgaattcagtataaaaaactgccggtggctcaggcccgtaatccagcactttgggaggctgaggcaggtggatcatgaggtcaggagatctagaccatcctggctaacatggtgaaaccccatctctaaaaaaaatgcaaaaaattagcaggatgtcgtggcacgcgcctgtagtcccagctacttgggaggctgaggcaggagaatcgcttgaagccgggaggtggaggttgcggtgagctgagatcgcaccagtgcactccagcctgggcaacagagtgagactccatctcaaaaaaaaaaaaaaaaaatgccctgatatattttataattaatgtgagggttggttgctagatgcttatatcaaattcaaattcaattctttctttgccattaaagaaagacactgaaatagattatggaaaatactgaggattatgccatgtgaaaaaaaagggttacatgactactacttcaagtactatttaaaaacagtgaaatcctttggctcaatagaccttatattaaaactgtatttcaaattaaaaaattataaattaactttgaaatctctaatctgaattttataaataagatcaactttgttttaaaaatgtataccaggctttaaaaaatgactctagaataaagcatttttcttttcacttattttaaatggttacattttactatgtcttaaatacctgccaatctaacatgggatatttgtttctcttggcctcaatgtggaatggtaattctactggtaataattggaagcctagctgcagacagacacattttttaattgtttttttctttttcctccttataatagtttataccaaaaaagggtataatgcatttaaatattggctttccttgagaagctatggcattaaggaaacaaagatcaacataacccactctcgtataaaacagggataataatgagttgtcatagggctcataggaataatgcacagaaaatgcttacctgggtaatgtctgacacacagcaagcatttggtgaaagtcagtaccatcatctctgctgtaagtgtaaagctttgctctccaaatatggtggctacatgtggctactgagctcaatgcggctagtcagaactgagatgtcatataagtgtaaaatgcatgctagattttgaggtctttatacaaaaaaaaaaggtgaatgatgagaaattactcagtgggtacgatgttcattattcaggtgatggacacattcattaaatccgtgactttaccactatgcagtccatccatgtaacaaaattctccttgtaccccacaaatttgtacaaataaaaatagattaatgttgtctcttcctaaaacatgtaaactatcatatcatttttatattgaccacacgttgaaaaaagaatgtaaattatgacattaatttttatattatgtgttgaaatgacagtattttggacatagtatgttaaataggatattttgctaaaattaatttcacttgtttcttttttactttttcaaatctgactgctagctaatttaaaattacctatgtgacttgcattctatttctactgggcagtgccatgcaggccaacggttctcaaaaggtagtgagcatcaatgacccagaagcttcgtaaaaacagattgctgggtccaccccagagcgtctgattcagtaggtctggcggggcctgaaattctgcatccctaacaaattcccgggtgattcttgacctcactttgaaaaccgctggtcttgggccttgcttcttaaaaaagtagtccacggaccaacattaacgtcatcacttaggatcttgttagaaacgcaaaacctcaggccccacccagacctactgagccagcatgtgcattttcacaacatccccaggctgcgtgtaaacatgttgaaacttgagagaaatgatatgaagtagtgtctgtcatccctgggtgaatataaggtaaacttttacaaacaccagtaccccggccccgcccctagagagtcagatttaatgactctggatgtgactcgagcatctgcatacgtgaacagctgattccagattaaagcaagcactgagtcccatcagactggatgtggaaaggccaggatctagatcatttgtacatcattaaggcatagttgacacagatcaaaccatattagagggtatttacatcccaaaagaggatcttgttaaccccaataactctacaattgttagaactggtgagaaagacccatattttggagtagagaggccttctgttattcgctccacctctgttccggccttaaataaacgagcacgccaactttaagagtgtgtctgaataacctcattagtttgccgaatgacttctcacattttcaggcggcacctgagcgttgtgtgtttcacagagcttggtaaaaataaaatcctcactgtaagagagaatctgggctcacgctggtaacatttaaaacttccaattctatatgcaaagaccatctgcagctttgcttctcactttcttggttgaacctttcagaaaacttttaaaagtgcataatacttaagagtagagtctggagtcagggtgcctgggttcgaatcctcatcctgccacttacgcgtggctgtggctgtaggtcacttacttagcctccccatacctcggtttcctcctctgtaatgagacctttttttattgggttgttgtgagggtgaaaattgttatttgaaacagccatggaaaaatctgctgctttgtaaattttatatgaatgttggttaaataatcaaaatatatttgaaaaactgtgcagatttccatatgtggctaaatttagtaatttttaaaagatactgtggtgatttccaaggactttcatgggcgtgagtttttgaacacatatatttagagggtttctctgagtgttgttttacatttttttcccaagacagcacagaattctcaattgattcctcatcgcttcctattatttgagaggatcccagtaggaaggaagtaaatgtagttttcccatgagtattgttttctagagaacattctttacccctgcagtcctttgaagagtgagttgtgctatagatgtttagagacctccctggtccctgtcattctagtggcattgtctagtatcccaggagaacaatgtgtcattctcttagtcaaatattttagtgcttagggcgaggcagcaagaccatctgaaacactggcgtgagtttcaaagacatattgaaacagcagtcagattctcctatagaaatcagctaatgctgactaaaagaagggatggggatgaacagggaagtgctgaagtcacgcacattgtaagcaaaatgaaggctagactaagtagagtaacatttttttttttttttttttttttttgagacggagttttgctcttgttgcccaggctggagtgcaatagcacaatctcggctcaccgcaacctctacctcccaggttcaagtaattctcctgcctcagcctcccgaatagctgggattacaggcatgcatcaccacacccggttaattttgtgtttttagtagagatggggtttttccatgttggtcaggctggtctcaagctcctgacctcaggtgatccacgcacctcagcctcccaaagtgctgggattacaggcgtgagccactgcacctggcctggagtaacaccttttatgcttgtctgcttcaaccacactcaatgaagtgaagcatatgcaagaaaaataaggatacctggtagctctgggcacgtagcaagcatccgtcgggtcatctacaggaacctcacccatggtatgccacctgctgaacaatgtaatgcatgcatcgggctggaaactaaagcccatacattgagtgactttagaccagtcatgcaagctccctacacttgtgtcctgaaaggcagatagaggcatgggactgcaactgccttactgactcttaaacctatgctttctcttgggcttatctggattacattcggcagtctgccatgatttacgcctttttgcagcactgtttgaaaggagtcaaatcatacgtccaatgacttctactgcctggttattgatgttaagtaaatactttttagtaggcgatttgtcatcacatgtgtcattttgccatctgggttgaggtttatcaagtgaggtgaaaatcttaacaaaaggttaaaggaccagtatcattgaaagagattatatagaaataacttcttaaaacctctgttagaagctcaattttctagttgaaactttgtttcatttatttatttttatttattcatttatttttgagatggagtttcactctgtcacccaggctggagtgcaatggggtgatctcggctcactgcaacctccacctcctgggttcaagcgattctcctgcctcagcctcccaagtaactgggattacagacatgcgccaccacacctggctaatttttgtatttttagtagagacgggtttcaccatgttggtcaggttggtctcgaactcctaacctcaggtgatcctcctgcctcagcctcccaaagtgctgaaattacaggcatgagccacggcgcccagcctgaaactttgttttaaactggctgcctgaattctttgtgtatttaaagagcacctctgctgtttatgtaaccatgacttagcttttcttgttatttctattccatttgaaattgagcatatgcaacagtcgctaaatctgctatgaaaattgtgaagccttctccatgtggcccactgaaggccctgcacgatctggtgttctgcagcatttctgcccagatctccaccaccttcctcccagtgccattgcctccagcctctctagcctcccttccattgcctcccgcctctccagcctcccttccattgcctccagcctctccagcctcccttccattgcctctggcccctccagcctcccttcccttgcctccggcccctccagcctcccttccattgcctccggcctctccagcgtcccttccattgcctccggcctctccagcctcccttccattgcctccggcctctccagcctcccttccattcctggactgtgcctcatccagggccctggcttgcctggctcaatgtgatgggaatgccttccctgcccagtggcgaatgccatgcagcctccagctttcacgtgtctcttcctcaggaaggacttccctgctccaccagcgtagccccgccaccccctttttttaactcgtaaagaatcaccttcctcattccttctaaattcaggttcagttgcttgaatttgttggagtaattgatcggagcccctctcctccactagcctatcagctcccgcttgcccctcacatgacttacattcctcccgcaggtactgcattctgcctggccctaagtaggggccaatacgtagttgctgaataagtaaatgattaaataagttctgccgaaggcattaagcaacacaagagtacattttttggttctatatttatcagaacttgtgaaataaaaagtatctgatcatgtaaaaagcaaaacattatgtattctaattaagcagctgtttccaaccaagacgattctctgaaacattgctttgtagctacatatttggtttagaagctgtcttaagaggcaggtgccacttgcttttcccttcaggatataatatgttctgttatcttaatttgcatttattctaaaatagatttcaataaaacaagttacttgcattcatatatcatattcctagacctttttcacaaccatgtgatactctactagggtagagtgaggtccctgataaacatttcttctgattagggttattgagagaattatgtatttgtctatatattgcctggcagttataccacctgaaaccatatgtgattatttataatgtagttttatgagcagacaggcagatataaagtaacacatcaaccatgccacctggtcaggccatagtcattccaatggtatgaaactctttcttgtggccatattatgcataagttataaacagacaatgaatggtcactgactgagaagactggagatttgcaatcttattttctggcaaatagccaagtcatgtcaacaggagagataaggagagttttgtgtgtcatacactgtagagcaggggtcaaagcctgggataggagagggcttggtcttcactgcatttatttgaaaggagctatggaaacttttcttctaccacttgggcacaggaaggcttgctatggcccaacaatgttttaaaatgtattctttacacatgtgtaaaacactctgaaatcatcaagatacagcatgaaacgtatcttttctgagacattaaaaaactgaataaattaatccaacaagccatggcacaattccataattactatgaccacagaagttaatttagcagggatagtacataatacacaccgtgctaggaaagtgtccttgaaactcatgacggtgaaggacgaattaagcccaatgaaggacagttgaccagcattcaagaggtagaaggaactatagattccttatatcaagtacatgagaaaaacttcctaaatgaatgaggctggaaacacaaaccctcagagactggacataggaatattttctgcgttgtctgtcttctaagcagactctctctctacttctacttctgtgttagcaacgactacagtgctgcagtaatatagatctcctcagttctcaggtggccaagtgaggccttgggaagctaaagttcctggactggccacctctggctgttagcaacctcattggtttacctctgtgcctgcaaatattcttgattttatgtatagtatattatagagaagtctggaagggaatgctttaaccagcaaagtcaatccattaaacaaaaaggtatgggagagacacgttaagagatcagtaaccatgttgtagtttaaaaaaaaaatgcgaagtctttgttcagaccctcggggtaagcagaagtagactggtctccagtggcaggcatgagagggaatatcctgcccgcagtgatggacattttggtttcaggcagagaggcaggaagctgccctctgaatcagagtaaatgctcacattttgaccttctagcaagggccctctttttcttggcaagaattccttcgaggatcattttcagtttgaggttctgtctgatgttttattttacaattaagtcactattcccatattcattactctgtaaaataagtcaagtaggtaagaggtgtggtagacacttccttctgcctcctgaggatccattttgcagccttcctcactacagaatcctgacagtacggccagttaacaactgacctgcctggattccttgcagtttctgaccaataagctaaaggcaaggcatcctgttgaaaatttcatatgcacagtaacgacactaacctcccgagaagagggcttccttgtccttttctttcttttttgagacggagtctggatctgtcgcccaggctagagtgcagtgacgggatctcagctcactgcaagctctgcctcccgggttcacaccattctcctgcctcagcctcccgagtagctgggactacaggcacctgccaccactcccggctaattttttgtattttagtagagacggcatttcactatgttggccaggatggtctcgatctcctgacctcgtgatccgcccacctcggcctcccaaagtgctgggattacaagcgtgagccaccgcgccaggctgtccttttctttctaaccttgttctgctcctctttttgtagactgaaatgcagatgtcattctgtgggggtgcatgctaacagagagatgatacagcgatggagagaggatagagaggaacctactctgggctacctgtccgtgggatttcttgttatttgaggcaaacccaacctggtgaaatgactgtattgaggtcatctgttccatgaaagctagaaacagaaacaaaacaatcatctaaaaacaaccttccttacattagaccggctgaacgacagcaataaactattaggcctgccattaagatattagttaaaaaatacttccagaagttttgaaagaacttctgggcatcaacaacgaatgcttacaacagttgtggcattaagtctccggcccattatcatttcctaatggagcaaaatctgccatgaaaaatgagccgacatgcctaacgccccgggagctgcatcatttgaatatttttgactctaaatatagtgaagtagttggctcttttttctaaaactacaatttactgatcagtgatatcaagagaaataagaacacagcagtgatcaacaggaaacacaaaacaggaacgcattgtttattctgttctcggtggacactgccagatcattgttcagagagctttcaacagggttgcttcgatggagtttagggagtttttaaatctaaattgaagatgaaatgtgtcctcgggacagaaaaagcaattttgaaaaggttattcaaggccataaggtattgactttgagcgtttaaaaaaaaaaacaaaaaacctgtaagaatcttactgtggtttcttaaaatggtgaatgctgtcagtcataatggaggggaaggtaggtttgattaggcggccggtgaattttcagagttaaacaaagttaaaaatacacaggcaacatgaaaattgttctaagcgttcctgtgtcatggtttctgattaagtatcatgaatggaagaaatgaatataaatcataacgattccgttttataacagacagtctcgtgtaaatattttgtctttctagtcacatgtgccaagagctgtgtgagagtgtaatgatggagagcgtggtctgtacttacccgccaccatcaaacccaactctattactgccagcttctgtggctgctacaatcttcttgggcttcagttctcttacccaccaaataggcactgtgtggcccttgactcataattgttgtgaggcttaaatgagttaacacatgcaaagctcttaaacaacagcaactcacaggaggccctccccacgtgttggctgaggctgtttccatcatcatcttaagagcatgggcttggagaatcaagagttctgagttaagtttctggtacttcctcgaattagctccctggtttgggcataatcgttgagcctcattttcctcatctgagcaatgggaatatcgttcattaccttaaagcattaagaagaggggtgaagaatataatgctggaaaaccacacctggcacactggaatcattagataccattttgtttacattacacggaaaaaaattatttgcaaattgatcttcaaaaatatagagacttttactttgctgttggggaaaatgaaatggattgggcacacctagatattgaatttaatttccttatcatttatttcagatagctcacattcaaagttttatgttttgggtttttttttctattttaattttaaacaagaatacatgggactgtcaaacaactggattaagaaaatccccatatctgagctaatcactttgtcctatgattgacataacagtctccttcgagcaacagcattaccactgcttcatttagtaagtagagaaggctaaagaggaaaggtagtggcgttaaaagaaatgacctggaagaaatagagaagaatggactttgtaaggccctgtgagagtctatcattcctctagcagggggaggagcagagttataatcctatctaccttgttacaaacaaatacacactaacttaacattgattgactatggttataatgaatggtaattgaagaagtatccctctatcacagcagtgattacattccaaggaaagaactgagggtttggaaccaggcacagctgatctcaaggcgtggcttctcccatggcaagccatgtcactttaggagagttacttaatctccctgagcctggatttccttatctataaatagcagacaggctgggcatcgtggctcacgcctgtaatcccagcattttgggaggccggggcgagcaaatcacttgaggtcaggagttcaagaccagcctggccaacatggtgacaccctgtctctactaaaaatacaaaaactagccgtgtgtggtggtgtgtacctgtaatcccagctacttgggaggctgaggcaggagaatttgcttgaactcgggaggtggagtttgcagtgagctgagatcatgccactgcactccaatctggatgttcatccatttttttttttttttttgaggctctgtctcaaaaaaaaaaaaaaatagcagacaaccccatctacctctctgggaggtttctgagaggattaaatgagactttgcatgaatattggctactccatcaagtggttgcagaggaggggttcagtaggctgttgttgctgtttacctctttttcctactacactgcaggctccttgaggataggattcctttaaaaacaaaatacaaccagttcccagcacagtggctggtcgctagaatgtactgagtgaatatacaccaaataaagcaagacagggatactttgaatggaaagatcaaacaacagcaataatgaatagcaggcttgacttgtttaagtgaaaatggttaagagagactggcgtggacaaactgaactgatgcattggggaacagattaagtaaaaagtacgtaaaagacaacatcttcttcacacacatatttagaagggaaagataagccgtaagggacagagaaactgttatacgacccgaggggattataaatagcatccttaaatggggctatttctatatagcctctctattttttactttgtagaaagattgaatgactttgacctatgatttctgagagctctgtctgatttcttttttaatttacaaaagtttttatataaaattcaggtcttctcatttctctctgagcctccctcctcccatctgtctccaccctatcctaagtgcctccactttgggtactcttgggttttatggctaaatccagcaacgcagattgtgggcgggcaggtttcccgtattgttcctaccgcccatttctctacagcatttcttaaatagggcctagtctggagactttcaggacgagtgttatagttctcacttttcatttaaccttgaatcatagctggaaagcacattacgaaacctaggtaatcatcccctacacattttgaaaatttgggagcagaagatgattttacaggtaaagccatgaccagcgccagggtctaagaaacattgttgcggcgaatgggcaggtgacatcacatggcgcaggcagcatgttccagatccagatctgagatgggagagggctttccacggggcctgccgggctgttccgtgagcaccagggctgctccagcgccagctgctgctttgttctgcctgggagcagctttgtcggagacttgctactcaaacccctcatgaactaaatgagctgttaatgctgttcgcaatcgtagactcattgaagtgtcaggtggtagcatcaatggagcaacagaaagaggttttcatagagaaagaaaagagataccgacagagaaaatggggtttgcaataatttcagtaagaatggattcagcgggggaaagaaattaataggctatatcctaaaaagaaaaacaaataaaatttggtgcttcaaagtttcaaattaggcacatttcagttgagtcatagccagacactcaagtacggcagtgtgatctcagaatcagtcaactatcaaaggagaatagcaccatttaagataattagaaaaatgacttcagaaatgagataatctcagagaggaattattcgtacaaggctcgctggtgaaacttctgaaaaagagaaccttgcagctgagttcactttatagcattatattagggtatacttatttggtgaattttataattataccctgtaatgaatcttacctgcaaagacagagaaagactcaattcaagccacccttctatttgcatatataacgttgggtaagagaagaaggaattggaaagctcttcaccaacggtgcccatcactgtggccaaacgtgggttctaaattgcagagcctccaccattctgcaacttgaactctgttttcgtgttacagattaagatctatccacttggcctattttaaaaacagttgcacacatttgaacacaccttcgagactccaaattggacttctgtaccaccttctattttcggtaaccacaagggtgctggaaattcaagtactaacaaacgccacgacctacaaacttaagaacatgagctggagaatacatgattcctgggccgcagaacacacctgcgctctggactccaattattctttggggcgtttgacttacagatcaaggaccaggtcaggtcatctttgtttgggatgtttatactcttttttgtgaagtcttcaacattgcattgctctttttcttaacactcaaaagtcagcttaagatccagtgttaaagcttatttttgtgtttctttgagattaatatgatatttccattttccatgagaaatgagactgccttccttctactcttaagcagtcctgtagagaactcctaatactcattcatctccactcaccttatccagattcgaattagctacaaaggtactcagggattctatgcaataattattcaaaataaagtcataacaattttattatttagcaaagtataatttatgaaataaatcatatttataagtataattaatatataattgtgtattagataatagagtaattgcttatcaaatatggaatatatttatatataatcaagaaattaaatataatttcttataatgtttaaatataaattattaaatataattttagcaaataaagtcataatttcattctatagtctcctctatttttatgtttaaatggatacattggtgtcctcagaatataccatttttttacaacagaatcattcaagagagacattataactttttaattctcttgatttttaatgcaatatttcattaaactccttttaagcattagaagtttttgaaaatgtgccaggtgaggtattgttaggtaattttgctgctattcttgcttcttgaccattttctcactgttttagtgcatttggaaatgagtttgaccctaagtttcttcctacctatataaatacttagaaactcttgtactgtttccaaatcaactggagcagtgcctccatgggctacatttgccgttatctgtttcactgagaaacaatatatctactgtagttaaaaagttcatgaatggtccttgctaatttctaggctgttgaaacatgtctctaatttcacagattttgaggaggcaagagatctggagttttatttctttttttttttaatagcatagtgttggatttattcaggatatgagaagacagtcatctgcgcacaacacatttgctatgaaaaaaaattgttaaactacacttatctccactcactgcttcagtggttatgttaactttgtcctgagagtagctagcattggggtaagatgtaaaacacaaaaataatgatgtattattcgatcagtctattaacccatactgattagtggccacactcaaaaagacatattgtagcgaaaacattcccaattctcactcacatgataaccaccctggctctacaagtacaatacgtgtatctttgccacttatctgttgaatgtgtactaatagcttcctccaatgaataaggactctaaacttcagggatcattacaaggtacctgaggagctgggcgactctacagttggaattattttcacattaaaagagccaagaaatctatgaactcatattttactcaatttatttgtgcagccatatataaatagatggtctattcatgtaaaagaaactattatttcaattctaagaatgttaacttcattattcataaactagtccattggtctgataagaaagcatctctcatctcacagacaaatactctaaaatatgtttatcactaaacaactggctttatttagggaacaattcaagattccctgatcacattttctgaaatgatccaattttgtcactcagcattgactctgtaccacagaaattgcattcctgttccacattgtgtcaatggaaaggaaggctgattttggtacttagctatgaatattccatactctctgttctctgaaaaatgtgaacattgagtagaaaatcatgagtatgggggaaaaataataaaatatatgaatgtgcttttaagagcatggcaatgtagtgaggcttattaaaatgccacttttcataaacaatttaaaaagtttctctaagtactaatttgggaaagtatgctaattttcaatacttaaaacctacatctgtttaaattagaatgagcacatttttgccacatgtcacattttattaccatgcaatggtaagtataaatttaccacctacataagaacaaaatatgggcaatacatttatgaatacattaaatgtttaagaaaaagcttttctgcacttcatatgatcttgttttgtttgtacagactcatgtttgtgagctgggcaagttagcttcagatataaggtatacatagaccttgggtgtggaaggtccaggagggccatgacttctgttttattcatatagcacagtgcctgccccatagaaaaaacctagctcacagtggagaaaagtgaatgatggaataatggacgtacaaagccagccaaggtgaggctgtacagtgtttatcataaacagtggatgttctgaagatgacctcttgacttgttttttatttttcttactctaagtgcctcgggtgaactctttcacctagcatgttaggactaatctgcaacgtggaatttattataaaagtgagtgctcatacttgatatttgtcacactagatactcttaaaaatgtgaaaaaaataagattgtttttcccccacaagtacatgccgtcagagtaaccattttcttctttagatcagagtgctaatagtcaacaaagggaaattgttcaacatgtacagagccccaagactctggattccttttaaactccatgtgaactgtatttggttccaaagtagagctaatcattcttaatccaggggtaaaaccaccactgccagtaaacagacaggccccctggcattgaagatcaagttggtgatgatcagttttctaatgggacagcttctaaataatgtcccaatttaaaattgatgcaaattttgataatggaaattgacaaaatgtttatattcagagggttaaaaatttgttttctattgcttagtcttgtggcatcctagttagatgtctaaacatgattggtgctacctaaatttcctttggccccattctagatacatctccttattttgaaattttcataacgttaagtagatttagaaaatatgggacggcgtggtggcttacgcctataatcccagcactcgggaggccaagatgggaggatcacctgaggtcaagagtttgaaaccagcctggccaatatggtgaaaccccgtctctactaaaaatacaaaaattagctgggtgtggtggcaggtgcctgtaatctcagctcctcaggaggttgaggcaggagaattgcttgaacccaggaggcagaggctgcagttagctgagatcatgccactgcactccgacctgggcgacagggtgcgactccatcgaaaagaaaagaaaagaaaagaaagaagagagagagagggagggagggaaggaaggaaggaaggaaggggaggagggaaggaaggaaggaaagaaaatatgaacaagcaaagagaagaaaataaatcttcagaaaaaaaattgttgacatcctagactgttttttttcttcctccctctttttattgtcgtgctatttctgatcttgaggatacggaaatttggtgttcacttataaataacggtttccatagagcccatgagcaaaaaatacagagagaatgataaaatgagaaatgtaacattttcttttggctgatctgtagttcccacaaatgggcagtctagaaaactgttgacagtgcagggtttggaatgtggccgactcaagctggaatcccactttccccacatgtgtgaccctgtgcaagttgtttaacttctctgcgcctgtttcctcttctgtaaaatgagaataatgtactcatcagagcgtttgtgtgaatagtcaatgagaggtatttaaagaatttggcacgctgcctgacacactgtgcattgaatgaatggtggccattattattatttataagaatacttactgttattttactttcttaactaaccctgcagatcgcaaagctccaataccatgtgatgtgaagactcattttagatcagcccaagaaaaacaccattaagcaggtaaatccaaattctgttgggaaaagatcatatgatgcattctcaagcaagtgcttcaggattgtggcactgcagtctctactagcctaggcagtggcaggatggctgttctttgggaataaggtctttagaaaacagtgagctcccacattctatcctgtcatcatttttgccgtgaatactccacataatttatctccagatgattagtttgccttagtgcaatgtaattaattgggaccagaagatacaagagtgtgtttgttatactctaatgaagtttctttgagttttaagttggacttcaacagttaaagaacaacatgatcacggaaagtcaaatggattgtatattaagaagatttttatttatttatctattatggaaatttatttttattctgtgtatttttttatttttgacccagttgagccttgtttggtcaatacctctgggagatcttgacaaaacaaagcgtgtctgggccaaagatttcctttccatctctggggattttttttattgatgatgaagttattatggactgagagccagttatgtgccaggccctgtgaggtatcctttgcacaaattacttcatataagagaacgactggtcctatgatctatgcacagcatccttcttttacagagaccaagcctgtggttgaaagatatggagtcacatggcagcggccacacctcctcgaaagctaaatccatgactgggccttggtccccgcaggctcctgcctggcctgccccttcctgtcctgcaaaattggaaggacattggtgcagaattggaggagccctgcctttgacaaggcacatacaaagggaaagtctgtcaaaaagcatttgttttactttcttttttaaaagaaaaaaaaatactgttatttactgacttttaaaactaagtgaccaaacattggtgacataaaattgtttcttaagtataacaaatgtcacttcaaattgttttttggattttaaaaataaccaggtaaagaaatgacgttagggtggggagagagggcagcagaaagagagtggagagatggagaaggaggaggagggaggaaatccaggcagtgggtggggcacggccccactgatgagtgtctgagccatgggcgcttggtgctattcagggaggcaaggtcctatgttcataaataatgtactacagggacagtttgaaagtgatcattaaatttacatttttaaggcaggggagttgcagtcacagccacaaatataaaaatctaaataaggtgtcttcaagcattgtcctgggacaagaactgcagatacatggcccagcctcaactctctagatatcctgctgatctcagggaattcagatggtgtttcctgggtccagttctcccccgccacccctctgaggaagcccaatctaaagcatccatgttggatgcttttaccatgacaaggtgtggagaaagaggaatttctataagtagaatgataatgaggagctgccagatttctagcaggctggggactcggtggttccccttgacatgatgcttctgggcatgactgaggtcctgggtgtgtgactgagggtcagggtgatggtgtctgagcatgattgaagtcctgcctatgtgaggaatgtgggaaggatataacaggactggtgcacccagacctctggcctggggagaagctgctttcacctccagccaggaagagtggctcccagcagcaataccccacagtaactcaaagtcattaatcatctcactaagtaaactgtgtttgattcacagtaggcaagagtgttcacagatgatgcctaaaaacacaagtagtgtgtataggcgggcttcatgagcttgcaaactgagcatgtgcacctgaccctgtgcttagaacggccaggtgttctgtttgataccctgctgtcatcatctataacttattcatcatacttttggaattgccttttcatcttgcgctgggccctgcaaatttatatagcagattcttgttgggtaaatttcaacagagataaacaaagtttccaaagtttctgagactccaatctcacatcctacaccctcaaaaatagaagaaagaggtcggggcagcttcggcaattccttcctctctcctgccactgggacaagctcacctctgctgcaccctccctgcctcagcaatctttgatctgtaccttcagagaaggtttttatcctagtccatccccagcagacacctcctgcccagcctctctctgaaggtctacatggcaaccacgggctacatgtggctcccgggcacctgccttgcttgcactgagatgtgttatcctgcaaaatacacacaagatgcgaaaaaaaagaatgtcaaggaaatcattactattttttatacttgttgaaatcatattttggctgtactaggttaaaaatattataaaagttggtgtcatctgtttccttttactttttaaaatgtggctgatagaacattaaaaattacataggtggcttctctttgctgctcaatatatttctattggtctagacattttttttaaaaccacatatccacctaagtgttccacctatatctccatctcagaaagtctcaaaccagtttcactatcttcttcccccaaaacactttttccatgtcttgttttcccaagacagaaacctggtgattaaaccatagcctgcttctactcccaaatgccagctgagaactgttggttctgtctccataatctctccacgccagcacttttcccccagccctactgtcctgtctcagctgagccattcatcttttcttcctggattactgtactgtcctcctacaggaaattcccttattttttttaaattttcttgtagagatgggatctcactgtgttgcccagggtggtctcaaactactgggctcaagtaatcctcctgcctctgcctctgaaagtgttgggattaacaggcatgagccaccccacctggccctatgtgaaattcttgaattcattcccaccctacctcagtggtgctctcacaacagagaaactatcttataaaggaaatcctatttcaccttcctgcttgaaatgtctcacagttgccctgccatctggctctggtctgcttgctcgattttactcactatctctccatatcgggcatcctgcattccagccataccaatggctcccagggccctgcagatttatatgaaatccatcgctccatgcctgggcgctgtggccacgctgctccctggtcacggtgaggctgggcatgcctgggcgctgtggccacgctgttccctggtcacggtggggctgggcatgcctgggcgctgtggccacgctgttccctggtcacggtggggctgggcatgcctgggcgctgtggccacgctgttccctggtcacggtggggctgggcatgcctgggctctgtggccacgctgttccctggtcacggtggggctgggcatgcctgggctctgtggccacgctgttccctggtcacggtggggctgggcatgcctgggctctgtggccacgctgttccctggtcacggtggggctgggcatgcctgggctctgtggccacgctgttccctggtcacggtggggctgggcatgcctgggctctgtggccacgctgttccctggtcacggtgaggctgggcatgcctgggcgctgtggccacgctgttccctggtcacggtagggctgggcatgcctgggctctgtggccacgctattattccctggtcacagtggggctgggcagcttccagagcgaatgtggacatattcttaggccccacctcacgcacttcttcagagaaacctcagaggctcctccacaagccacgggtacccccagatttccctcactctatgcatcccatgcgcctctagcaacgcaggaccacactcgagtagagctgtctgtgccgaagactgtttggcagacactgtttcagatgcgttccagacacttaggagagcgactgacacagagcagggcttgactgattacatccctcgctcatttctcccggccccgtcaccttagttcatgcccaagttttcctcttgtcgaattcatcgacactatcatttcgtaatcttttcttgtgcccttcatttaatttgatactgttaccagttatatatttttcacccacaaatatgatcattacttttcctctgtaaagaagctccaatggttctctctctttctctctttttctttccctaaagaattaacccaaactacttaacatgatgatgatcctgatgctgatgacaaaaataggcatgggtggccattcattctgcctctgacgtgccaggcgctatgccggtcattttgcagtaatctcatttaatcctaatgataatactcagatgtaagtgctattatctcttccccctaagtagggaaataggggtcaggaaaagcccaggagcctgttccccaagaccaagttagcactacagagctgggaatgaattccaactttatgtgactgcaaagctcttccatgcccccacaccaccccacgcccggttctccctactgttcctacattccagacgcaccatccagcctgcaatgtgctttcacaccatgttcacctgcagacaatgctttctccatctaatgcccctgccttcaccatgcacacactgaagttgcctagaagggtcagtcacactctactctgtgccttccttctgcctcggcacttgtgatgctgcgggattatcagtttcccctccctcatcccaaagactgaacagtcaccaagagtagcaagtcgactagtcaccactgaacatacgcagcctggagaatcagaggtgcacggtgtgtgccttttacatgaactcatgcatacaccaagaatgatagtaatgcctgctcacatttgtttagcatctcccacatgccagacctcaccctacacaattagaatacataatccattcaatcctcccaccactctttaggataatgtatcatcttaatccttatttattttttccagaataaacttgtgattctaacaacttcaacataaaataaataacttttgctcaatatcaaactctataaaatcactaaaattggcccaatatcctgggttttttaacttgcattatttcttcctgataatgacatttaggccagtcaaatcctgtattaccgttttaaacaaagaaaaaaagattatgagttgcttttaaaattcacgtgtgacaagcagaaaaaactcgtggaggcagtttcaacatttaacctaagtgtacttagcaactacacttaatagctttttaaaaagcctcgtttttaaaaaaagtggatctttctttgcagagtgacttaaaatacatcatcatagtcttattaattaaacatgttcttatcagaaaaaagcgtctcgaaagctagtatatatgcttaattaagctgtatgcaaccatcagtccatatcttgaattaggctacatgtgaggccctgatttgccccattctttctgctacccagaacagcactgctcactgcctaccagtgtttccagcaaagatataaagttctacatgtctaaacgtttttgccctgatatcaaaagcaaagcaaaacaggtcttctccattcccattttggttaacagcatcaccatctgcccactggcctgatccacccagaagcctgtcttcttttttgaacttgaaatactcatgtgctttatttgtataaattcccattattccctcactgctccaaaaatagagaagaaagtaacataaatgtactgacatcaatttgagaactagaacatgttaccttcccgaagtatccatcttggatatagggaaggagacttagcctcataaaagcacatgaaggaatgctcagaggaaatactctaaacctagttttctggaattggtaagcagaagctctggagtcagttacaggttgtgagccttccaccaagaagagccacctaacataccaaaaaaataagcatgagattcacttaaagtttgacaaatttagcaactcctttccattgtctgcattttagagaacctattgatgctgttgtaacagctacagagaatcgtgagatgcccagtgacattggctatagtggtagcaaaccgggtagtgggaagttttctaacaaatactatgtaaaaggagaagcctgagtcttttaacaccacagatcaaacactgcaaatggtaggacgagcattagagtcccgctgaggtcgctgagacttacacttcacacgaattgtagtggtgcctagatctccctgaagagtggcagaagcagccgcccatcccttaaactacacatgtacctggcttctcaagactccagagtttacttagagatgagtaactagagcacaggaatttggaagagagtctttctataaactcccaggaacaaccaacaccagtagtggctgacgtctgtgagaccttctttgcgtcagatgcagtgctctcatcaacatccaacacacgtgcctttaatgcctgggactatggcgacactcatttagatgagggaactgtggcatagagggtttcgtacctcggcttacttcactgcaatcggctttctaaaccagaactcccacccgacaatgtgtgagtccaaagtccatgtttctaggtgcagtggctcactcctataatcccatcactttgggaggctgaggcagacggatcacttaaggccaggagttcgagaccagcctggccaacatggtgaaacccgtctctgctaaaaatactattagctgagcatggtggtgcacgcctgtaatcctagctgctcaggaggctgaggcaggagaattgcttgaacctggggaggcagaggttgcagtgagccaagatcatgccactgcacttcagcctggatgacagagcaagactccatctcaaaacacaaaaaatacaaaaagtccatgcttctaaccactagcaatcaccctataacatattcccctcaatgaaaaagactgaatccaagaaatctcacctgcgtcagactttctaagtcatagagatttatagtaataattttaaatgagtctttgactttcagacccagcgtatgaaggaggagagtgtgagtcagtgccgttcctgggcgtccgctgggaacttccctgactgtccttctggctctcaggagtggagctcacttgctcaattcattccagtgtcccagaggtcacagtctcccctctgtgagctgggctgtcctcggtccctgggcctatctctttgctgtcctccctgggatcttgcccctggggtagccctgcttcccttgcagctttcttctctgctgctggtgccttccccagggctgtgcatgggcttagctctttcttcatttctctccctctctcctcttttcttcctgctgtcttagctgggccccctccatccttttatttcctaattgtacctgttgcttccatacccttaaaagcatactccattttctccctagatgtattgaggtataattgacaaagctgcagacatttaaggtgaaccacgggctgctttgatacaggcatgcactgtgcactgatcaccacaatcaagttagtgatcacttcttatcttttttgtggatggtaagaacatttggatctactcccctagcaagctgcaagtgtgcaatgtggttttattcactacagtcaccacgctgcatgagatcctcagaacttatttgtcctataactgaaagtctgtgccctttgacctcattttcctccccccaccaattcctggcaaccaccattcgactctgtttctatgagttcaacatttagactccacatataagtgagattgtacagtatttgtctttctctgtctgacttgtttcacttaccataatgtcctcatatgtatgctgttgcaaatggcaggattttcttcttttttagggctgaataatatcccattgtgtgtatatacaccacattttctttatccattcatccatggacaggtccttaggttgtttccatatttattcctttcctttgtatgtatatccagaagtggagttgctagatcatatggtagttctggttgtaatttttgaggaaactctgcacaattttttacaatgtctgtaccaatttacattcccatcaacagcttacaagggttcccttttctccacatcctcaccaacactcgttatcttttgactttttggtgatagccatcctaacaggtgtgaggtggtgtctcactgtggttttgacttgcctttccatgatgcttagtgatgttgagcacgtttccatacgtctgtttgccatttgtatgtcttctttggaaaactatctatgctggccctttgcccattttttaactgaatcatctctctctctctctctctctctctgtgtgtgatgctcttgagttgtaaacacatttcttaatctttccatgtgctttaatctcagcactttagcaactgtcaagaacaaagttcttttcaaaaagttcatctcaaagttggccactgactcgtaacaggtaaaacccaatgagcacttccctgagcctcagtttcttcttttctcatgtgaaacagtgatgatagtgcatacctcccagggctgttgagccagactcaacaatttacatgaaagcactgagggggtgccaaatacatgtgagtggtataaaacaattcttgatgctacaaagcttgcttttccacactattgtcaaaatcccaccttgttcgagccccaattaaaataccattttctctaatccatctttcccgatcctctaacaaacttcaattctctgagcaatttattatcatcttctggaactccattgcttaagacgatcaaagagtttctttattgtataagttacttctgcgcatgtcttttgaaggaataaataaatgcattgattatatctgccttatagcactccatcaccttctatcttaaattacagtaactagcgttcctgtcttcctgcactaaattgtaagctctttcaatggcttcctggcttattctctcatcttttcctccggtccttgatggatgtataataaatgaatgagtaaattatatgaaaatgcaagtatgatttttttaatatacagttacaacttcgacatccacagttgggtctgaccacttgttaagttgtacccagaacttaggtctttctcgctctccacgttccctatcaaggccatcttttcaataccaaacaaattagaaagaatacaatcagctaacttacactaacatactaacaaatgggacaacagtcttcaaggtctggaagaggagagcagagaactcatcattgcctgctcaagcccatctaccaggaggggaaactccagatactgtgggccacttggcacttaggaactcatggtactgatctgtatattgggcagatatagttttttggtgatagtcttaaaaatcatgtgtcacctgtcatgacacttgccagatgaaattctgattttatttcccaagagaatgcactgacaaattaataatctgacctttaaacgggtgatatttctccatgtcaatcaacaagaggccattctgttttgttgaccagataaaatactctttcactctctgaggggttagcgagagtgcatgcagatttctccaatgctttgcttttggttggaagcagaaacatttaaatttcaaggcaacacttttcctaattcctactgaactcaaaagctctagtggttcagtgatcccattggtaacaaatacttagagggccagagtccttctgggtcctatccttacgctcctgttctctcctcctctcaggccttttctgcaccatgcaaacccagcacctcttctcacaggctgggctaaaggcagaatgcaataccatgactgaggagcctgggaatgaggcaattcattaacagaacattccccaggaaacataattttctgatcataatctctttgttcctgacagttgcaaaattaaataccagagccaaaaaaaagtgaggcaccgttttaagggtatgttttcctaattcgatcttcaaaggaagcacaagcttagggttcgaaatcattatgatgtaatattatgccacataataatacatagatccaatcattttaccagataaccgtcaatataaagcactgacaggacatttgggacttcgggtcaacaggaaggtggtttttcaaactaaactatattatttatggctttgattgtcatttacttttacaacataagggtgatggtaattctgctcttctgccaataaatctaaaaattaattgaaaatgtagtcaaaatccttggcacactttagaaggaagatttttttaattaaaaaagccatattaatcattatataaatgagttatattagtcctgtaaaattaaatctatggtggaaaggaagtcagtgagtgatataatcggatttcagaacacatatcatataaaaagttatgtttctaaataaagtgagtgtgaaagaattcaggatatattatcagtcatctgagttactgccctaagacagcccttctcccaaaacagatatggtttctctgacaaagaagataagtgtgccttctcatatttttattattttcttaactgtcagacataactcatatgtagttaagttgctcagaaggttaaattcggaggaaaaattctacaagtggtttaaatgagccaaatcatttttggttgcgtcatgtttcctccgttgaaaaagtctcgatgacttaaaaaggattgctttgatacttagcttagtgttttacccaaaaagcatactgaccaaaaacaaacaaacaaaaaacccataacaaaacaaacatttaaagatatgtagaccagatcagttttctcctgatgaaagtcacatggaaccacacgcaggttaccttgctttcagcaggtccctttccttgggtgtgaattttatttgttacaataaccgacttggcctagttactcagccatccttcgttcactcttggtagtggacatggcaagatggtgggtaaaaacacgtaaacaagactgctctctcgtggaggtcactttcacatggaaagactggacacgtcaaaacacttcattaacatgatataaaaataatacaacatgtaaagtggtatcggcgcatctaagacaaagcgattcaatgttaaatccctctttgggaaataatttaagattgcagaaaatgtttctgagaaattccaatgtaaacgtccttaaaagtccctactttttagtatttggtattatacttatagattttgtgattttccagatttttcattaaaagttaatatgcataaaactcttgggatggtagcaagtacagagtgaaatctatataaattattattattatcaatatcttttggagtgaacaaattgaacattttttgaataatcttttgcgtagttgactgaatactagttaataggtttctattgttttcttgagttaaatcagaagcagatattttgattgactgtgtaaggtcttgcagcttctatggttttttttaacttgaaaaggtcttcccagactgatacctctttctgtcttgaactctctgttcaactatattctaaagccttaaaatgaagatcttcaattttataactctggatttaaacttttctttcttattcttttttattttacaaaagaaaattttaactctttaggttgattatatttcttgatgaatgtgactgtaccaagaggctttaaaaaaattgagattagaaatcagtttttcttatcttctgaattattcaccatatgatgtgttgcatttgagctttatctatgcttctggtaatatttctgtcttatataattgttaaagtataatgcttctcaccaggaagactatatatatatatatgtttaataatagcctttttaaattttcatgtgttttttcttctcctttgttttctgatttttaaaaaatcagaaaaatgtctgaattgtcactttatctgtagattcaaagagcactttctaatcatgtgttggcattagcacaacaccggggaagatctgattgctgtaagccgttcattcattcagcaaatactgactgaatatgcagtatgttgacctgtttgctgagggcctctctgttccggctgccattctaaagcgagtcaagttttccctgtaacttttattctgcagaagtaacctgtacctttttccattctcttgccattcaccactctcctgacctccctttgcgtaaactggtttaagcctggcgctctaggtccatccaacaacaccggtctattcacactgtagcagagcaaccaagcagttatacaattttcatcttaactactagtaatactatgctataaaaattttgaaacctagattttgagatattgagcaaactaaaatatgtagtatttactatagtgcaagaatacgtctgacgggttaaatgcacgcgttttggaaagtgctcaaacccttcaccagatgacacagttatagcacaacaacagctgaggttattgttatctaatctcctttccctcgttaactttagcacagagaactgaaataattgggtgtgaaggcatcttgataatctaccaaaaaggctcatttttaagcagccaagcgttgctctcttaaacttttgttgtttagtagcataaagtgtaggcaacctgtatgaagtataaatatctggtattaaaaagacccagtgaggcagaagtcgctgactcctctcaataggtggaagaggattctccatgcagccgaaggcttaatgaagcacatttccaccagccaggctgctgcctctgtggtgttacctcttcagaggactcagtgcctctgagaagctggctgtcctcagcgagaagtaagtacagggacttctgtttagaggagactagaatgaatatttatactaataaattttctccaacatagccaaaatctcatttgaatatgtttttctttctgtgcatttaaaacacttgccattcttcatggcatcccatgcttgtactcttagaggatcttcacgagtggcacagctcttggctagaatcctatttttttttttttttttttttttttttttttttttttttgagacggagtctcgctctgtcgcccaggctggagtgcagtggcgggatctcggctcactgcaagctcctcctcccgggttcacgccattctcctgcctcagcctcccgagtagctgggactacaggcgcccgccactacgcccggctaattttttgtattttttagtagagacggggtttcaccgttttagccgggatggtctcgatctcctgacctcgtgatccgcccgcctcggcctcccaaagtgctgggattacaggcgtgagccaccgcgcccggcctagaatcctgtttttgctatagtttgttggactccttgcggctaatccttgcagctatattagtctctgagggatgctgaattgaatagaacatcagaagatttggagcctgacgggtttatgttgcccctgtcctcaaattcaactattccagaaaaaatgtactaggacaaggaacctgaaaagaagaactatttctaacaatggattggatgaactctcccattcaaagcagaggatataattcattataagacttgtaatttactttaaccactgggaaaacatctcagagggaagagagaaaaactgaatttctgattaaatttaaaaaatcaaaaatttaataagtaggcaaccgtataaatgaacagaaaaaaacaaaatatcaccgaaactttcagataatgttctttgttaaaaataagtttccctaaattataatatgaatatataaagagaaattagaaaatataatgagaacattaccaggcctttttgttttctttcttttttattgtgtttttgtttttttgaggtgggaaaatctttgaaagtaagacccttgattggattcaggaaagtgaaagctttctgaatttttgctcaaataatgcttctctaaggtacagaatttaatgctgaatttatgtctacctcacctgtatagggaagaggaaaccactgcttttttggccaaaattcctacttggtaaactagtatatttccgttttgaagaccaaggtgcagtgaagtgtggtggagttccatatggatctgttatgctgcaaacaccaaagtaaaaacccgtctttgctggttccccgtcatttattcagcaaatatcatcttaattgaacttaagctgaaacgtgagttcttatttgccaatactcagaactcaacagttgcagaagtgtttccttttaactgcatgtccatgtcttgagtttttcagaaataatacagaaaaacatattttgaaaacatatttatctgtatttttccacgtgacagtggcagtttaggatttaacaggcatatccataattaaattgttagtttgaggaacttccagaaaattatctaatgcaatcatatatcacaagtcttctttataaaatacaagtgcaactcatttcattatgctatccatgtagttagacataactgagacctttaaaaatattataaatgacttaaaatagaaaatgttagaaacagtacaggcatattacaaaatcatggtttctgaaatctaattactatatgcaatttaaaataattaaacatgattagtctttaagatgaatagaaccaattccaactttagctattatttaattatagcatgctgtacattaaaatcagctggaagatagccaaaataagctttaaaggacagcatgataattaagaattgctatttatcttacttttattagaaaactcaatgctggaatgaatgcaataatgtcaagaaatatgaatttaaataatttcctaaatattttactttctaatcccaaatatcaggatattttaaacttcctcatcaattctactttatatacaaaaattcatacagtattaattagaacttttgctttcaacacagatatcttaaagacaaggaattatgtatttataacttcttaataaaactatgggtacattcttatttttgattgtggcagttttttcataaaaaggctactgaaatcaggcttatttaaaaaatactaataatgttatctaatatagaacagagggtaggaagtctctgtaaacaaacctatatctatatcaagagtgattctaagagaatattctctcccttacccaggtactcaagttgtagggtaacataactagtgtaacgtaactagtgatttccagtcaccttttaggtttacttaggaacattaaaagaaatgctgccattgtagacttcatttcaattatttaatctctttccagttcacgacctttactttcttctggtttcagcaagaaaaacaacttcataagtgtcttacattataatcggctactaatcatcatcaactcaacattagttttaaacagtctgattccataacaaatttgtaatagggatattttctatacattttataatagccatggatagaaaaatagtattatttatatactaaaacattcaagttgttttgtttaaaacatacattgtaaaattttccctcgggaaatttggatttattataggacagttgtagcttttatgaaattgggatcctgaagccatattttcaaatcagaaaaatgaaagcctcattgttgtttttcaaatgttttaagtttccttgataaaaggcagtattaggacttctatttctaggtcaagtctatatttacagtaactaataggaaaatattgaagtctgaggttaccagtacaatgtctgaatgcaaaattctggacactggacaaagtactttagaatcagaggccagcaaagctctggaaggctgtgaacagggacaaatgcaatatggttcagcagacagaaagtcagaagtaagattcagatgtagccaagcagggtgggggacagtgaggggggatgtctagctggacttgaagggcgtatgaaagcagctgtccttgcaggggagatttaaaggaaatgactcttcagggggcactgcatttgcaaaaaaaaaaaaaaaaaaaaaaaaaaatctgatatagtatgttttggaaattccaaaatatttgatattgccagcagaagagttggaaagtggcagaaaataagggtctaaaaatagccataagcgaaagtgcaaagtcttgaaggatagagattatgtctctgaacctggttctcaaaattgttgaattattaactatggagatgcgctgtacagaattgaacttaaaatggtcatctgtgtatagcatgtcatcttaaaaggttactaaaataggaaagaacttgcacaggtataaagtgtgtgccattcctcccgtgggctaagggtcttgtctcacttggtgccactatcaatgcaacaggcacagcagtcgggtgtgccctggatatttctacacctcattcttctaaaagctcccccaagaaaaattaataggaaatcaggtgcttgctgcaggtctttgcactgtgtcaattctaagaaatcctttggcagtgtaaagctttgaaggaaattaaattggagagagattttctctacctttcattcagctcatatagaatcccttacttagctgatatttttgctcatagaattggactcagaactaagtctgttcatttagctttcctttgaatgttaaacataatgaagtacaaggccgtcacctcaccattttatcccctacaacccgcataggcgtacacttatcaccaaacgtttgcacatgtttggctccactgagattcttagtctctatctttatattttgactattttgacatttagaacaaaagtttggaaaactattctcctactgctttagcattctcttatcttagggcttatgaacattgctacatctctgaaacaggcggttcctgcccatatctatcagtgaaaattatacttaaaattctgaagagactcatgtcatccagattttggaggaaaaaggtagcaaataaaaatatacttcttagaagtagatctcagttactacttattttaaatttcacagtagattccatcttttgtagataggggttttgttcaaagtttttgaccaaacatttttattaaatattttcaatagtattataagtgatctgacatttttggtaacaaaacaaccaaagaactgacttgagtaaagctgaaatgttgctgaaccagaatctaatccttactccgtcattttcttaccagggattttgatttgactgaccagtttcaatccacagtaacagctttgttcctaagagactataaatcaaggaaatactcactaccaggcaattcctcctgcaattcggggtctgtgctgttattatgaagcaactgacagcaaacatttgctgcaagtatgagcgcagatttggatgaggtgtgcggtgtttttggtttcactctttatctctgaaacctatctgcttgtgagaaaaattgtgcaagaaaagaagttttactgccacatacctcagctgtcctagaactcaatgcagaggcttcgcttcctttctttccttggattctgagccgggggagcacaatgggggtcttgtgctctgggccagcaaggcatgcagatactcggaaaggaggtgtgaacggcttccaatacctacactgtttgctttacaactaccccaactaaatcaaacaggacaccaagacactcagtccagggtaagcaagtacaaaatccactggctattatgacccacatagagaacagaattcttcaatttaagtgtgtacatagctgtgttaagagttaaataaatcatttacgaggcttaaaaagaaatgcttctcatgtagttctttttcatgtagttctctgaatacaagtcaaagtgcaggtcacgaaagaatccattgttcacaagcgagaaatgttgttggctgtgaggacggttcagaacaagccatcgtagtctgctcaaacagtaaatattggttttaaaaccccaaagcatatcggtcatgttttttatcttccaattgctagaaccaaaattcactgaaacaactctatgtctctgatactattttctagaaatgtgtgtgtatgcgtgtgtgtatgtgtctgtgtatgtttgtttggtaaatccaaatcacacaatcaacgtaaatctttcaggctaagttttgccccagttatttttatgctgtgctttcaaaaaggtcaaaaaagcttacctctgtcagtgtactgggacgctcaggaagccccttctccgcctcggcctcagcgtgcagacatatgccctgggagcccacaatctgttaacaggaagcaggtaaacccgagagcgtccgcctgcgttccagtccagtgcccgtcccagcacacacctgctttttcagacctgccgctcatatgccacagccacgcacaggaccagcgttagcagagtgcaacaccctccgtttggatccctcgttttcagggtaagcagctagggagctgctgagataatattgcagggaaagcttgccttcccaagacaaaaacctttgctgctgcctgatagcagatatgcagcattatcactctgcattccacattctccaatcagctaattggaacggcagtcaacagcctgtccaaaaggcagcttgcaggcctgcgtggctgtgatcattgtatactaacatgcccattgcttctctcttccctgaagagatgtataaaagaggcttcttccagggcgaagctcagcagaatatgccacactgttttccataagtaaaatggctggtcctctcagctctgctgcagacagctcattgggttccactggcttttcgtagccatagcaacaaccaacagacagacttagcaagcatggctgatcatgtgcagcacactcacacagcttgttaatttcttttcatcaaactcatcatttttttgaggagggtagcttctgttatctttctacacatttcaccgatagtgcaagtgctccgatttttctgctctcctgaagaactcttttttatatgagccggggctatgtatgaaatcgaggaagtgaagccctattagtggctatccaggttaataacatgcaaatcacttaagagaccctaactggaagcattgtcaaaacaagccccaccttccagtcatagaatgagtgcagagagctgcaaacgggagagttacactttttgtttttaaatgataatcttagagccacttaattgaaacaaaaccctgtgaattgctatatagggtcagaataataactaaatcaggtagactattttaataagatctttaaatatccatttacttatggctcaacttatctgattactttaagatgctttttatgcaatttaaaatagaatttttaaaaaatcctattgcttctacggcagaaaatgattctttaactcaatcttatttgtaaattaaaaattctttttaaaaaatccgcacctaattaaaaattctttgactttaaacattaccttcaaggcaagaatagttttacttcctcagtaaaatggatcacattccacccgtccataacatttcacctcctctgggaatctaccatgattaatgccatgaacaacgtaaatcttctgcagaacccccaggcttttcttctttttcaggactctatcaccagtcatattctatctgatatatttccaaggcactgtcccatttatttttgtttctagcaatctgtttcaaatagttatgttaacactttggacttgtaaatatagatgttctatttgctaagtagtcattgatttaggattccgtcagtattgcgtttccctacccatgttaacactcctgccttcagtattaattcccaaattttgactgcataggaatcctgtggatgtagatttggggatgcccgctccccttcctccccaaccggattcacattaggtaggtctgagccacccagggtcagcgtatccatggaggacaagtgggtggcgctttcctgcttgggagagtcctcaccgcttcagatcgcctccagccagcctaccttttctcactgaagttcccttccctgaagttattttgcatttgctgttgctgagcgtgcccctgccttcgccctcagcctcccattctactattcactgcccacgtttcagaatcctgcattacacaccatttccttgccctgcagatgctgctactattaaaaaccttctcaatctgactgctcctcgccccagcacctttaacctccatcccaatctgcctcctcttttatcttccaacacctggcccaaatggaccacctcactcatgactctcccaggtggggtctgagcgacctcttctgcgactcccctgtaccggggtccacctctgctattacaggccttgtcacgccctgggacttcttagcagttctccttttatgtctgactcccagactgttctatcaactctctggaagccaatctggtccatgtcttctttgccctccatgcttggaatattctaatttctcaatgcctctaaatgaggacctacgacactgtatgaatagggactgatgactggctggtgtgaaatctgtgttttaatttacttttcaacatcacacatttgttgactcatcacttcagaagaacttcagtgattttgacaaaatgctggcatgttacaaaaggatatcaagaaaactctaggtgcacttgatgttttagggtggcttttcttttcattgtatctctgaaaatgtctttataccctcacacttgattgattggttggcaaggcataagaatctctggccgtggctcacacctttattcccagcactttgggaggctgaggcaggtggatcacttgagcccaggatttgagaccagtctaggcaacagactgcatctctacaaaaaaaaaaaaaatcaaacaaacaaacaattagccaggcatggtggtgcacgcctgtggtcccagctactcgggaggctgaggaaggaggaatgtttgagcctgggaggtcgaggctgcagtgagctgtgatcacatgactgcattccagcttggcaacagagggagactctgtctctgtttttagtagcaaaacaaacaaacaaacaaacaaacaaatatctgaagtcattttcctttggaatttcaaaggccttcatccttcttcttgtatctcctcctcccctatacctccaattcctgctcctccaaagagaactggaagtcccccagtttgcactgaaccggaactgggaagctggcaggaactgagatgaatccctttcccctctttgccccgtggcacgtctcccggcatctctactggccttcacacatcactctgctgccagtctgttcttccaaggctcttggctccttcgcctgctcgaagcccctcccttgtaacttggtgcactgaggcccattggcattgctctgacctcaggccctgccctagcccaggtccctgacgtttattctccttccaaacgtgtttgttttaaaatgtgctagatacagatttccaagagacaaatctgatttttccagcccatctttctgagtcaagtgagataccacctatgtggccagcagctttatacatgggctgccctgtgccttggtccaatcagctatgacaaggacacttggcattatctagttttaaaattttgctaatataataggtgcagagtaatggcccattattgtttgaatgtgtgtttctctaattactgacaaattgaacatcttttcattgttgatggttttcagggttccctcttctgtaaattttctgttcatagcttttgcctgttttctctattgagattgttgtcttagtgtggaattttaaacaacgtggtcataaaggtattttttatatatatttaaacattataattaaatttgttatattattaaaggttattaagatatccactaacatataaagggaaccctataattcacactgctagttgttttggtttttattatgaaatgaaaatacagaatgtgtgtgaaaatctccattcagaaattatgttcagtatgaaagcgtagaataccacaccataatatgattttctaagacaaatatttgtttagaaggattttcaaacaaatatattatcatcaaagaatacatatacacacacatatatatgctctaatagtatacgcacacacatatatatggagagagagagagagctatctatctatctagcttctattttaagttataccgtatgcacacctacacatcaatcaatctacctatctatcatctgtgtatcatctatggaaggcaaacacaaatgtgcaaaatgctaacacctgatgaatcttaaatgagaatattttcagtttattttactattctttgcacttttctataagtttgatttgttttcaagatacaaagttttaaaaaatgaaataaaatgagaataaaaatagtgtttagaatagacacagagttaaggttaagattagttgatgaagacataactatttatcagagttgaaactaaagaagttaataagttatggagtaactaaagtgattactaccattactgttactctgaggaggctactctggtagagagtattggaaacattttgcactttcttgaaacaagtttgctatttccctacatttactgcttccctgtattctgatcttaaaccatttatcctctggttcgtattttgaaatccttattagtctgtttccttaattcaacaaaatcatcactgcttgaagcaataggttcttctctagtcacatcttctgctgcagactccacagctgggacccaccaaaggatctggtccctggcacaacaaagaaacacgtcatatgacttaacttagagactggaattgaagcatggtttatgaggtagcaaagacttttgtaaagcttagattgaattttctaattcctaaaacaaataaaatagaatatcccaaaggttattccaaaaccttgcatatttagttactctcacaatgacgtgaacaatgtcaaaataggacattgatgggaaatgtgacaactgacttaggaggaggattgaagtatctcagtcaaacaaattggatttatttctatgattccaaccccaagaaatatatgctggaaagcagactgacccacaggctactaatcaaatgcgttcatatcccctgaagaagtatgaccctgatcagtatccagaatgacttttataaatcagaggtgcccaaaaccaaaacaaacccagcagagttgagggtttttggaaattcacttatcaaatgaatttaaaatgagaaaatgattatagaagaacaaaaccttgccagagagcaaatgataagaacgtaaacatcagcaataaaaaaccgttcaacaaactggagagaaagccaaacctattaacacaaaaacactgtgtgtagcccattagttgttcctagaaccccctagaaattctgtatactctctaggttaagaggaataaggaaaatgtggcaagaggtacaggaagaagtttcagctagtcctaagtctggagagcccggtctttactggctaataataacaacattgttttaaatatttcaggtttatcaagctttgggtttgcaaatgactatgattgcagcagcttacaggaactactttatcgtaaaatgtgtgttaatatgtgtcagtaccaggtggggaaaaaataatggtgttatccaataataacaaaagaaaaaaaaaaccacccacaattaaccccctcccacagccctgttaaccagtcccaaacatataaatacatcttgctgtagctagagaaaagtactcctggcttttattaaacctgcagtggggagagattctgcaagcaatacagaaaaggctgcacttgctcccaaggaatttgactgtttatacttcataatgataagcttaaaaagcgacctggaaagagagggctggctgctttcatgctcctgtgaggggccacactttgttcttggagaggcactctgaccacattaatagagtgtagctcccatgacctttcccacttagcattgtgtcctgtggcagcagtggcccccaggtacttccgggcaacgtgccaccctacccagtgcagaaaaagcactgggctctgccgtcacggcattgttgaattagtaacgaaacgcaccaggctcagcaaacaaaacctggcaagaaggattttaaaacaaatgcttctggtttcacctgagccactgaaacaaattagaaggtgctgggtgaaactgggcagcttccgtaaactctgaagaagatcatgctaaagccctcagctgccaaatgtgcaaatctcaaaagaagtgaaaattagagggtcaccttgtgtcttctagaagtgcttctgaaatacatgttcagtaagattcattggtcaagataataagatgggcccaagtgatgtattaatacaatcaggtacacgttttaggatccaacggtccaacaacaagtggaaaatactgttgaaaaataaaaatccccaatccgcactggaaatagtagatgttcagttaaaggcctgacagtgacagcacgtgcaggtaggaaaaataaactatgcgtgcttgcagaatattggatgggagctataacccagaatggtaattattttactaagcctacccaggtcagaattcagtgcctatgtgtttgtttgtttgtttgtttttgagatggagtctcgctctgtcgtccaggctggagtgcaatggcacaatcttggctcactgcaatctccgcctcctgggttcaagcgattctcctgcctcagcctcccgagtagctgggattacaggtgtccgccaccacaccaggctaattttttgtatttttagtagaaacggagtttcaccatgttagccaggatggtctccatctcctgaccttgtgatccacctgccttgccctcccaaagtgctgggattacaggcatgagccaccgtgcccagcagcctatatttttaaaagtcagactctggcatcctaattgccagatcattgccttgaactgagaacattcttctggacatttcctgcatcaaaggaagactatttgaaacattccttgtgagaggtcaggagatcgagaccatcctggctaacacggtgaaaccctatctctactaaaaatacaaaaaattagctgggcctggtggtgggcgcctgtagtcccagctacttgggaggctgaggcaggagaatggcatgaacccaggaggcggaggttgcagtgagccgagatcgtgccactgcactccagcctgggtgacagagcgagactctgtctcaaaaaaaaaaaagaaaagaaacattccttgtgaggtttaaagtagcatgacaaatcattccacaaccaactttcctataggcataaaggtagattttaaaaaatttatctgagagctgatacctgacctgcatcttgaaggacccattattctcttggcatgtggactctttcctatatctttccttcattaaagacatggtttgcttccaacaattggaagcaaactcaagttgtgtttcaatttttggtaacacatgagaaagtcttatcacaggatcaggattggctgcataggagagaaagctcaaataacagggcttacaagagacagagctatatttttctctcacttgaaggattgagaaataaggagttctaggctagtagaaaattggcctcatgattattaggactctagctcctaccctctgttctgtcatcttttgaaactggtttctatcctcaagaatcctcgtggtccagaatggctacttgtgctccagccatcaggtccatgttccaggcaagaagaggagagggagagccaaggggcacattttccgcttgagttggcctctttgaaggagcttttccccacctcccacccagcacttctgctgatatctcattgcatcctgagtgataagtaagtctcaaaaacgtggtcttttcagccggacgccttttggtcccaggtaaaccagtgttctactactgagaaacaaattgataatagggagtggatagacaacaagctgcctctgccagctcatgtcagcctgggtacaaagaaagtactatctcatttctggacattgtcagtgagcctttattcctggctggtcacctgtcagtgcagggatcacccaggctgactcggtgggttgcggaagcacccttccttcattcctgcctgggggtgtccttgcctatccagccactgtgcttaactcctcagcacagactcaaagcattgccatctctccttatactggtttcatatcaatatctcaaagtatacttgttcattcactgtggaacaaataaataaatggtgtggattcaaatattctgcaatttgttagctgtgtgatatgcaaattgcctaacctctttgtgcttctgtttcctcataagaaaggatgataatattatctaattctgagggcggttgtggcaattaaatccattaattagcataaaagggtattaggtattatcttgaattttgtatctttgatttatggtgcggcactgggtgggcacggacctccgggaccttccaataccgtgggaaacatcagctggacgtggaccagagcgtcaaaaagcaacacaaatgcatgtgttcatcaaaagaatggtccagacggtgagggccgtgggcttcagcaaaggagaaacaggcactagtgtcatcagtgggaacttatcgcaggctccctgcaacctcacctggacagcgcggcgctgtgtgaacagccagcaggaggccttttcgcttctgcctcctgctttccttcccggctgatgtcctcccctcccctttaatttaaattggcaccagtttcctattctctcggcagccctagttctttccctcatttaaccttttcatagaatctagtggggactttatcgaccagatgccaaggggctgccagggcagggctggccttcagaggaggggcatggtgtgcccaagtcctgcagttggggaaggagtagggagctgagaccacagagggacagggacagaggctagggagcagcgtgcgcggacaccttgcctgcggggaaggcctacggaggccttgcagacagcgtctcagccgacacacagggccctttaagaaaagaggcaccgtgttctttaagagttctgtagcagagtcctggcagtcccgggacttcacacgctgcacatttacttgtgcttttatttacttaatctctgtctgtcccgcgagattataaactgcaggacggcagagatcatttctgttttgttttgaccctgcttccagggctcagtatcgtacctgggctgtggaggatacagaaatgccgaatgaacaaatgaacggatgactgggccacatgggtcccaggtgaatgaattctatctgccccttaaggccatcccttgattcaatccgacaaacatttcttcaacctgaactaacccaagaagatccgcatcaagggtcagattactaaagcactgcccaccttctgggtgggtgaacgtgagggaacaaatagtgatgttccagtgtgatttgcccacgcccggggggcaaggggagcagagggaacaaatgaaccgtcccgcgcctcaccaaggggccacacgcgagctaagtggctgaagaggagttcgcctgcctgggaagccagggacaggacttccaggtggaggaagtggcagctgtgactgagaggtggagtggcacagaagcctgtgttgtggcaggaagcagaggcgaggtggacagggtggaagggtcactgtttgtcaaacaccttgtttttcgtggtaagaactttgggccttatcttcctggaaataacaagccaccattgagttgtttttatgtttgtttctttttttgagatggagtctcgctctgtctcctaggctgcagtgcagtggctccatctcagctcactgccacctccacctcctgggttcaagggattctcctgcctcagcctcccgagtagctgggattacaggtgcccgccaccacacccagctaatttttgtatttttagtagagacggggtttcgccatgttgaccaggctggtctcgaactcctgacctcaggtgatctgcccgcctcagcctcccaaagtgttgggattacaagcgtgcaccaccacactcagccccaccatagagtcataaaaagaacacagatgtgatcattcttgcattttagaataggagctctaggacccatttacctgggaaatacattttaatggagtcattcacatggtttgatgttttggtcgcttttattagtcgtcattattacgaaacatgtctcgaacaccttcttctgtgcaaggtattcatattagttgcccgaggagatatcaacaaaatgaaggacccataaattataagacataccactattttatgttccaccaaaaaggaaaaaaactgctgccaatgaaattgtaacacgatgttattttttgagtcttattattatttgttggaagagatgtttcaaatgtattgagattaaatttcatcctctatcactctgtgtatagaaaaaagaaagaagtgaaattagttggctacaatattcttaaaattcttcacctgcagtattcagctcttctgaatgacattactatttagggtttgacagtcatcctttatctagtgtttccccagttgggtgtgcatcagcattaccaggaaaagtggaggaaatggaggcccgggccacatgccgttccaacaggcctggagctctgtattccttgttggtaaccaaaagatcctgagacccccaaagaggaggaaacgctgcccagcacatcaggagagatggcacagcagcgcttctgaagtgagtgcccgcttctgttttcagtattttttgtattcggtgagttttcacagacatgcatatgacaaggttgacacaactgccatgtgcctggcagagacattgtttctgggatattagaaaagacatacgatgggaactttacaaaatatgcaagaagtatatgaatgataataacttgacttctatgaacaggaactaagtagattgtggcacagccacgccatgggagatgctcagtgttgaaaagtcattatgtagaatgatattttccacagggtgttccaggacaggctattctacaggggcaccacaggcaaaacaaggttgggagatcctgcaaaccatgccccttgcctagagtttcagagtgcgctcagcattctgagagttctgagaacgccgggagtataaagattttacattttaagctagaattttccaattatggcattaaagaaagaaaaggaaaataaaaactcgagaccccaattcacgatgccaaaggaaaaaattaagctgaaagctgagtcatgcaggaagctgcctttcctttttgttcctaagcagaagctacagatagaaggtttgatatctccacaggtagctactctgtgtttgccttatcttatgtaaagtgccgttttacggagtgtcagaggaatacgtactgactcttcccctgcccgctcctttcctcttgcaacaagtggattcagtgatgtgaccataccttccttctttcccctccggcctccttttcccctttatgtaccgaagtcctcaaaatcatctttggagaaaggcatgtctctcaggcatgtccttaaccttggcaaaataagcttctaaattgattgagacctgtctcagatgctttttggtttacaatgttcacattatattttaaataaacagcaacaacaataagcccataaaaatgtatggtggcaccattccatttttgtaagtaaaattttggatatatagtcataggaaaaagacaggaggtacactcaacaataacaatgtttaataacgagggattgagttatgtataaattttcttttgtttatttgtatattctttagtaaattgacacattttctgaaagaaaatggttattaaaaatagcaatagtaaactgactttatgaaaagtcagagaaagatttgagttttcctgatatgttctgtggaggaagctttgatgaatattaaaaaaaattcagtgagaagatggagacttgttttatgaaacttctcaatttccacgagacaggaaaaaaagtgttattagtcacacatcacagtcagaggaaagaagaacagaataaattgggcatcatgtgtaatttttctgtggtctttttcaaggccgtgcatgcatgaaatagaacattttaaatcaacaagtcaggctggtttgtctgcggttcgataaaaaggccaagcagagaagcccgctgattggatctcagaaattcgtgaagctactaagggaagtcaccttaaagatagcagctgataccgtatcttagggtaggaatacctcttacaagttaggtcatcttgggcagcctacttaactctcagggtcctcatttttttgtatcaaaatggccatggttactgcatttgctccctggaggtgtcgtagcaaagtaccccaaaccgggtggcttcaaacaacagacatttttctcacagtactggaggccagaagtcagcagatgaggtgtgggcagccccatcctctctctgaaggctccagggaggatctttccttgcctctcgctactcctggctgctgccagcaatcttggtgtttcctgacctggcttgtggcagtgtaaccccaatctctgcctccatctgcacacacatcttccctgtgtgtgtctgtgtacagatttctcttttcttataaggacaggagtcattgaatgagggcccaccttaatccctatgaccccatcttgccttgttacatctgcaatgaccctatttccaaataaagtcgcattcacaagtcctggggttaggacttcaaagtatcttttgaggggacacaattcaacccataacagttatggtgttacagctataatcctttctgggaaaaaagctgttgttccctatgcagttgggtctgtgaaaaaccaactcagggacaactcaactgaactcaattcatacatcgaggaattcccaggatgctggtggaaaagatcaattaaactgcatctctggatgcttttttttttctttttactgaattggcagaaagactcctctgctagatttagagtgaatctaccattataaaattgaatcaacaacaaaaagggataggtgtgatatgttgaaaagattctaccaaatctcctctagactgattgctctttttagaagaatcttccagggtaacatctcccaacccacactctcatgccaaagtgcatcctggccccacacgggtggcaggcgggctgatccctacacatggtttctgagattgatcagggggcttccaggttctcttcagccatcagtttctgagaggaacacctgggatttcattgcatctccaaatacaggcactgcttcttaattcaggctctccgagattctgcaccctcccctgggtataggtcaggtcctagtagcagcttcagaccaccagtaatctaaagcagttactgcagctttcaaaggcctaaaatctcagagaattattaggcacatggggaatatctttatttgttcattttgttctgttttttgtttttttttttactgtactgagtatcatttataatttcaaaacagtgcaataacagtcaatgtaatttattagcagattaccatgtgccaggcactagctacaagttttagaaatattaaatctcttccttatagaaaacctgccaaacaggaattatttttatttgacaggtgagaaaataggcttaaaaaatgtatgacttccaaggttaaagaatcacctgattttaatactatgcagaatttcttacttcagcactgttttaatgaattgtctgtaaatgtagaaactcctgtttgttttatttggatcagattcctgaaagtcgatcagaaggaaatggtgatgttcccagcatttctgttatttttctttttgccattgatctaggataaatcattttgatcacttttgttgcagtttctgtatctcagaatactggtattatattttttgttgttctcaggtcctgtgcacaggcctgtgggaggggagaaaacattatcatgatctagaggctagattactttattagcagcaataccacttgaacatctaactacagagtcactcctgaggttaatgaaataatttttgtttccagatgttctttacattgggcctaagtccactgtgaagaaaagaagaatggttttgattttctcggttgcgatgacctagctggctcaagacttcctcactcggtggctatagactatcttcacctgaaactcctacaaagtgaaacatcccaggtcactccaggaagtctttctgcggttaaacaagctggcctgaaagcatttaaagtccatggcttaccaagccaaacaagaactccattcaagcaaaatctaagtggagaagcatcgtttcagtcagccacattttaatcagcgacacctcatgaaatgtggactcagacaaaatattttaaaattcattttgccacatcaatgcatttatatcataagcaatatccctcagaggtcatgtgctctgcagaagtagggggattttctccacagtttttcttcatattgaggacttggtggaaatgttttcactcagagtggcccctcaggcaccctcacctagctgaggtgcctatgctcatcgaccactactacctgttcttcaagctaccctggtctacgatcaccacaaatccaggacctgagcagagcctatcagcatgtcatggaaatctttctggagttttcttataaatcttttcttttttctttgccctgtgcattattcataaacaagtcatcctagtctctaaacagaacaagttggtcctgtgagctactgaggatatgcgaatgtactgcaagacacacttcacaatgtgtgaaattatgattaccttgcaaaatcaggaccatcaatatatactgttttttctcttttttcacctaattcactgggtcagtaggaaaaaaatggaaggataagaggccaatgaaatcacactaatttattcaacaaatgtttttcctgacttctgtgatgtatagggcactgtagtcaggtgaaataacagtaaaatgggaatcagaagacaggatttactataaaattgatccctaattatgtgaccatgagcaaattcctgactttatgtccctcggttcttttatttgtagattgggagtgatttaagcatctgcccactcacaaactattatgaggatcaaatgaatctttttacttgtgagataaaggacaatgcaagtgacatgcagtggttttccttctccactgctaccactgtaccccacccctgactacgtcatcatcatcatcaccatcaccaccatcatcaccaccatcaccatcatcatcatcaccatcatcatcaccatcatcaccatcatcatcaccatcatcgccatcatcatcaccatcatcatcatcatcaccattgccatcatcatcatcaccatcatcaccatcatcagaatcaccatcatcatcatcatcaccatcatcaccatcatcaccatcatcatcatcaccatcaccaccatcatcatcaccatcatcaccatcatcaccatcatcatcaccatcatcatcatcaccatcatcaccatcatcaccatcatcatcatcatcatcatcatcatcatcatcatcatcatcatcatcatcatcatcatcatcatcatcatcatcatcatcatcatcatcatcatcaccatcatcatcatcaccatcatcatcatcatcatcatcatcatcatcatcatcatcatcatcatcatcatcatcatcatcatcatcatcatcatcatcatcatcatcatcatcatcatcatcatcatcatcatcatcatcatcatcatcatcatcatcatcatcatcatcatcatcatcatcatcaccatcaccatcatcatcatcatcatcatcatcatcatcattgtcatcatcatcatcatcatcaccaccatcatcatcaccaccatcatcatcatcaccatcatcatcaccatcaccatcatcaccatcatcatcaccatcatcaccatcatcaccatcatcatcaccatcaccatcatcatcgtcaccatcatcgtcatcatcaccatcatcaccgtcaccatcatcatcatcatcgtcaccatcatcagcgtcaccatcatcatcatcgtcaccatcatcagcgtcaccatcatcatcataccatcatcatcatcatcaccatcatcaccatcatcatcatcatcatcgtcaccatcatcatcatctcatcaccatcatcatcatcatcaccatcatcatcatcgtcaccatcatcatcatctcatcaccatcatcaccatcatcatcctctgcattaggtttgttctctaaaaacacggtaaggaggggatttactgaaggggctttggggatgtgtccttagttatcatatctgtaagggagcaggagaggaaaaattggacaaagggagaaagtaaactttgataaatcttcagcagaggccacaggatgctatggtgctgagataacaccttctagttgccccaaaggaagacaaggagcctggaccttgggagccctgcatccacccactgcctgcaggctgcccacactaggagacgcagaaccagaggaggccattcttggagacagactcacttgtgagccctcagcaatgcacactctgggagctgggtgagtggacaccttagttctgaaagggagagatgagggattgtagcatccactaaaatcatcattatcatcatcatcattatcatgggcttgaaatggccttcaagaaatccttgaaggctcctggtcatttcgtttctataatacaacaaagaaagaaaagacagagtttccctgacaggtagcacaaaattaaaaatattagagcttaacctcagggaaggcagggaaccatggctcgcccaccgatcacagcaacacgagatcctaaatgtcccaagtggcagacactgtacatcaattccatatcaaacatccctcctccccacatcaattgcccctctactgccattccttttattgaatgatagattcccagggtggaaaagggctttgcaggtcaggcgattcaagtcactatccagccacactccaagatgggccatcccctgtggtggaggcaactacagtttcaagcatcctgttcttttccagagacttctccaagtgtggctggaatctgccttctcacagcttttaccattattggtcccattgctatgttatgggacaacacagatcagatttaatccatcctccatatgtgacacatacatattttggaactgcgctttttttgaaatgtgctcagtttccaaaacttgttccttttcaaagccaaaacctggcctcaatccttggaatatcttcttttcctcttcaattgcgaagattgctccaagttttttctaatccatgtaaaacaggatggggcaatcatcatactcttgctgttgggcccctctatacatgtggtctaatattaaaatactggactctcagctccatgggtaaacggtgtgatgtggttggcaaatcaagctctgtttttaagccatatcttccctatccttgtactaatgcagctggcttttttgaacagtagcatagtatctatgagatctgtgtgaaatgcagattccagctattgagatcttggtgtatactaatcttttttcaggattttttttcagtaccattaatgtgattacatacacacaaagtgaacagaaatattggccagaacaatagaaagtagaaaagagagaaagaatgagacagagagagaaaagctctgttattcccatccccatccccgttcccactagacacacagacacacaaaccaagagatgacattaaaggaataaatgaggcagagtgagcatctctccagaaggtagaagaatgagttttcttttaagttttgctcttaatttctggcacatagtcattatttattaaatgggaacacctactcggtacttacacatcaagctaaaacatccatgaaaaattatttcataatgtcacaatatattttttcataaattcttaattccagccatctgctctatacaacccatggttgctaatttctctacccaacttctttagtgctaccaaaaatgcatggctcaaaataaataattggatttttcagatttaaatcttcagctcaaatgactttactgaattaggagaaagaagagtatgggaaggatacctaacactcctgcattctctatatattaattaaattaaaaatttaaatttccactataattttcccaagagttccaggccccaggtatgatatagtgttaagaggcacagttgtaatcgcatgccatttgattatacatttgtactggtgatttttccaagtcaaacggtgacttcttcacatttttttctttgatttccctgattactattattaacctagatgtagcacattgaatggtgcttaggaaaatagtgagaaaatgcacattctggttggccctctagatgctctcaaatcatagtttggagaatgagccactaagctattggaattttcccaatgaatggatttgcaagatgaccatatagaggtctgaaacccagcacacataggtgctgtgaggtgggtcagcacatttttgccacctagctctttgaatcacccactatctgattttgagtctgcaaatagaaaatggttatggaaggaagcagctgaacaaatatcatcataaacgctgaagaagtaggagcatatcttttgtgtgttggaagaggcccccttttgatctctgaagtgcaaccaaattaagaaagggagtggcttcttcggggaaagtaaaagctcatggccaaaggatcaagaacattttctcaggatagagacttgctagttccattgcttcttttttcaagtgtaacccaaatgtcttgggttggtgctgtttgttgaagtaacatggttaattatttacctttctcaccatttggctaagattcttttcttatcaaattgccctgtctgaacccaaaacaaacaccctcctgagggcggttagccatcaccttaagctgggtttgtgtgagggtggctggacatttttctactatttttctcacggcctctgttgtttccagtagccattctgctagaaaggcccagagctaacttgtgctactatatgggtacttagggtttgctgtgacttggttcttttttatttttttagacctgctctttataactcttccttatttgggcgctattctaattcctccattcaacacggtgtttcagatttcactagagaaagtagccttttatcttctcaaggtttttctgccatttgaacttttgatcgtacacttgatcgtacactctaaaatggacccaacatggtcatctagaactgggatgatttagtcattaaaaataattagacagcaaaagggatattttgggctcttctcttctttcctccaagactcctacaggagcagattgctctggccaaatgtggcagaagaagagcgggtaggtggggtggcttcaatccacagaggctctgttgctgcagcaactttcagtctaaattccatgcccagacgaggcagctattcttagccttgactttggaaatagttttctcccttcttcaagtacatcactcttgaccttttatctttactttaaaggtcttgtgcagctgaatcctttatttgtttcctcaaatcatttttaggaacaaggaagatgttagaataggaaaggaataacaaatggatagggccctgaggggttaaatcacctggccagatcacacattgagtaagcagcacctgctctccttcagtgagtccggcattccatgaagggttactaagtttttattatgccgcaggtatgtggacgggtgttggccatggagtggtaaccaagacagagtcctttccctcagggagcttacagtggagactgaaggacagttctcttgactcctaaagttctattctttccactacactctgagatgttaccagtgctttaaaaaatacatttcctatttttccaaataggactgaactgaggcaaaactgtgaagtcaacaagacctcaatgctgtcatctctaaagtggaactaatactagcaccttattaaaatggtgaaagattaaatgaagtaactccttcaaagggcttagcatagtgtctggcacatactaactgttcaataaatgttaaatagtattaccagtattgtgttctctggttttaatatgatcaatccttttattgaagagaagcaatttcaatatatttgaaacttacgaatattagttctttgaatattaacacttggtaaggcagcagctttcagtctttgcacttatgccatgatagatggtttccctaaattaagctgaatcatgttataggtagacattcccttgtctggaatcttttctaggcactagttaagatttaaaatcatctaactttatgtaaaaaccccatctgatgctgttacatatctataaaaaagattgtattattttcttagattttaagattctacctttgcttaaaagccttagagtattaaatagccttaaatcaaaaatttaccctgaccaactataataagattatgtttacttactttacttctatctatcttggctggttaaaaataaactccacattttgacttagaagtcaatgattttgatttgtgtcaaatgagagtatgggagaatttggtcaccatggacgtggtttggtcacaatttgttttggttattataggttaaagcagaatccagtgatagctgatgaaacagaattattccttttcttaatttcagtttcttatatcttaaagttactctcatcccaagcttaaaattggtctaggatgtgcacagttgtaacttttttctgaagatttatttaaaagcacatttggttaccagcagtctatgaaaccttccttgtaataattcaatttgctcaaagttctcctgtggaaaaaagtgtatatgtatcttccccataaaggactttgagagaacagtaacctactttcacagcataggttggagaccgtttctgaacaagataaaactatcattcatgattagtccgaattcaggggtaatgctgaggtctaatattttttgaaacttatgtttacatccttgataaaattcttttcttctagtgatggcagaaacctaaagcagttttgatattctaaggtctttcctatctagctgttacagagtattaaaagcactactgtacatagttggaacatttttgttatcacattttcttcatatgtggtcttaaaatggctaattccaaagaacaaaagataagttatccatggaaaatgaagtcatgattttatctgtaccaccccatctgactataactaccatgcacattgtgtccaagtaatgtgaacatgtctggttggcacagctacaatagcagggctgataagtaactgatcagcttatccacagcattcctttcatgggaggtcactgtcccctttgtttctaaaagtccagcaaagcttaagcattccagaacctggtaattcaaattaattacatggtatcatgtacatggctcctgggattatcaccttgtaatactgtggcttctatgcttttaagtttgcctaattaaatcctttcaaatgaaaccagttaagcaattagtgctactacactatgtaattaatatatgccttaaacacactttttaaatggaatggtttgaaaaagaaatactttggataatagattactacaatacacaaaatacaaaaggattatcagtttttaaaattacataactatgggattcatcatatttctccatatgaaaaatgggaattatagtatcaaattcatagggttttataaggatttacacaggacatttaattcaattaaatttaatgtttagttttcaattaatatttcatattcattctcaactaatctttatttcagttaatacaaaaatgaaaatgtaataaaatgcaacactacaatcatagtggaaataattcgtttcatatattgcattcaaaagcacttgatgtttttgcgtcatataaatagtgtctatcttcctcattggactgacagctccaggagtctgattcctggaacataacatatgctccacaaagagttctagaattaaccaatgggcagtatgaacataaattatgacattggaaatgccaattaatagatatccagatgataaaataatgtttaaacagccttcaaatgtatgcttcataagtaaacacaaagtataaaatatatacacctgtattagtcaattctcgtgctgctgtagagaggtttaattggcttgtggttccacaggctgtacaggaagcatgatgctggcatctgcttctggggaggattcagacaacctacactcatggtggaaggcaaaggatcttgttaaaccatagaatccgcccccgtgagccaattacctcccaccaggctccacctccaacattgaggattacaattcaagatgagatttgggctgggacagatccaaaccatatgaacacttaggacacattaattagataagacacatactttatggtgtattgttagcatgtacacgtttctatcatgtgcttaagagcaaaaaaaaatataccctacctactcttgaaaagtttacattcatgtagagaagaaaacaatagttaaattgttctcaaatgaggcagaatgtaatcagtgctccacgtatacccttctaccagccgtatagaggagcaactagatcatgaaatgagaactactcttcttgtttccaaaatagtgaatgtaaatatttctatttaaaataattaattcctaggttgggccttatacattttaaaactcaaaagtgatttttaattaatattatagaatatcagtatacatttgatttgatttgtacataataaaaaataatcacgttttgctagcccctacactattgtttttcaaagcatattccaaagatgtttataagtcataaaatgcacctaacatgcaaagttataaaataaccaaaaagcgtttctgatatggcttggatctgtgtgttgccacccaaatctcatgttgaattgtaatcccccgtgttagaggtgggactggtgggaggtgactggatcaccagaggtggacttccccttgctgttctcgtgaaagtgagtgagttccctggagatctggttatttaaaagtgtgcggcagctccccccaatctctccctaagtcttgctcctgcctgtaagatacctgctctccctttgccttccgccatgagtaaaagcttcctgaagcctccgcagaagcagattcttccacacttcctgtacagcctgtggaactgtgagccaattaaacctcttttcttgataaattacccatcctcaggtatttctttatagcaatgcaagaatgaactaatacagtctccaaaaacaatttttaatcattttatgagaaaggaagtaaaccatagaatttaaaatttaaaatgttgcttaatcacagaaactaaattaaagaacatttcaattctaacggtgttcaaaattttattgtcttgtttagtggaagatggaatgaaaccatattatctcacattcaggtgaacttatgacattttttcccctgaggaatctagattacaatggaaaaataatttgtcaacagaacattagaatgtgcttacgtaagtaaaaattccagtgacaattcatttgcgcactgttcaaaaaaggtgatcacgatggaaagattttaaattttgttgtttgtatttttgccaattttgaaaggatttttttttttttttttttttgcaccagcagtgttcagctattggggactaagtattaggaaacctttagccagtttatctcctctcagcaaccaacatgatgggactggagccaacactcatagttttgaaaacctcccttgaaggtgggagacttactttcccaagatgaggagtgtctgaggaggctcaacccggcctgtttccctgaagaagtcccataaaccgtctattacagatgtgaaggagaatatcaagcctgttgacatgataatccagcttattgctgctcttcttgttcccaaaatagtgaatgtaaatattcatttattattaaatatcacttattattaaataagtgaatattcacttaataaatattattatttataataatattgctggggaacccaaatacgaatgtaataaacgatgacccagagctccagtgtggtgctgattaaaaggtttaggtgaagagctacagatgtctacttgggactcagatcaagaaccgatttctcatttgcttaaaaaagaagaatcatggagcgttttacagaagcagttgggaagtgaatgtgtgagcatcatactgacctgctgaggctaactgaaagctttccctgtcacactgtctcactgtacccttccacacggctttactttctgctcaaagcagcagctactctgccattgctctcatcagagtagacagataaaaggtcagtttataggagaggtcaggtgggacacagacaaagacaatagtgattagaaggacaaacagcagaaaagtctttcataatagtttagtaaaagcaatttaaataacaacaaacaatatttactaagtgattataatgtacacaccaccaagtgctttagggaaatcgctcatttctttttcacaatgaacctatgaattgggcatgaattttatccccgtgtcacaccgagcctcagaaagtttcataatttgccaaggtcacacaaatagaaagtggcggggtctctattcaaacccagctcatgaggcaccagagcttgacactacactgtgtaactataatgtcagtcacacccaaggatcaaatacctcttgtccacattatttatagaaaaatgttcttttgaattttaacacttaaaagtgtagagacaaagaaattatgcgagaacttggagtgtaacaaaaggtgcatttttgctaaaaactggctctgtgatctagggagagtcacccatgacctcttgactccagagtcctcagttcacaaagatagctaagctgcctcgaattctaaagttgtatggtgtttctgttcacacagcacttgaacatctacttactgcccttcacttatggatatttaattatgagtgaagggttttgaagagagactttatattattcacattatacctcttgcctctgcataggacctcacattcagttctaatctttatacgcaccagaaacaaaattacataaatctaagtaaacttgctcctatcaaatgtgctccggaaaattgccaagtttatatggatttttaaattttacatcaaacagatcctatcaactatttgtccctagaaaaaaaaaagatgaaaggccagaactgcctacaagttgcaatgtcattgactttccagcaagcattgcagctgtcctgggaaaactgaacctgaaatatgtttttgaaactgctgaatttcagcttctagtgtttttcacattttagaaacagggaaactattagctttaaaatgcttgtatttaatagtttttttcttaagcatttcaaaaaccccaggtgaaaagctaagtatgagaaaggttctcatgcaatcgttaatcaaatgcaactaggttggaagaagatacatgcttattgctttgcggaagtggcttttgttctaactgaataggttgaggtagattattcctatttaaacttagaaacggaacctctaatacaattgttaacattcctgcagtgaggtcgtttcatacaaatgtaactgtgacaggctgagatattccttttgcaaagcctataatctctatgtagttaatcagcataaagtattaaaatcataaatatgaaaagaatctcaaaagaaaaatgatttaaattactctaagactatacagactatccccaaaggcataatttctttaatagaaaaaaaaaaaacccacattgctttgagaacaaaaaagattctggattcttttgtagggctgcttgggccagtcccacctcttccacttgaagttttttgtttgtttgcttttctttgaatgtggagaaagtctctagcagccttccatttcctctggtctgaaagtctgtgtccctactgaagttctacagcttcttttataacatttcccatttgacactaattccaacagatgatgcttttctaagtttgtgttgtttataatttacagcacctggttgtagccagagtcccttgcatctccccagcagggtgtgcgggacccatactacctgcacccaggcctggctggccccgcccacaggccttagcttcctgcccagcttcccggctgcagtgggcctagctataacttgctctgttcccatggctgtgaagccatggccgcagcctctgccatctcatctcctcacgctgtgggttgcctctagctcccctgggggcttgggcaggccaccatcatgccaggggcgtcagaaccctggaaattctccaccctcctcaactcacggatgcgctggttgccccaagggctgtctggggggctcacggaggagagcctggaggagagggggaattgacactggccctcagagaggacacagagggcagagccagcagattcgagatgcagtagttccattagggcctcactcccatgtgacacaacagccgcccaaaagctcttgagaaactaagggcagctcagtgatgtgtcaccttgcatttgctttgccttttttcctgccttgtcttcagtctcctttcactcttgcatcctgggatggcatgtccgctatctcctcgcatacagtattagcatgtaagctttgcctctgcctcgggctctctgtcctagggaaaccagttaagtcctagttaagtaacagtaacaatccagatttcactctcaccactttgacatggaacctcctgtctctgatagcagccaagagggtcagaatcaccagaaggtatcacgtatgctcacaaagacgtgtgctcagccaccacagggttctcacggtgtttatttctatgttgtttctttgtccttccagcaggcaccgctgctttccatggggcataaactggacatctctttctcaccctgcctttgaggcactgactcttcaaggccccaacactgcacgatgttattttgcaaggaaggggagaacactgctctttctcataacatgcagtctgtcctcagaaagatccagtaacggtgggacttatgctccccattgtgaaaaagaattttaaacttgcagaggggagctaagtcagaagacaaatgcaaatggcaaacactcggggtaacttggatacaagcctctgacttaacctcagccgctggcttggagcagagaaagagggcatggagaagatgagtaagattctaagaatttccaaatgagtcattagaccaggactgaaacagtttgagaacactgcgctgggattcctcaggctattttacccaggactcatttccttactgcagttctgaagacaatgaccctggccccaggggtcggtccagtaggagggctgcaagggatcttttctgctgcatttacaacatccacgtattctgcagtcagagttcccaagaacaagccggagcacactgagcgctccctagggaggaggcctggggagagcttaagagaggaatgtactccaagctttatgtgcttgtaatttgtttatagtgctgtaaagagttgtttttcgatgggactgtcttctgagtcctgtacaataaaggacatacgtataaaactctaaaatgtaaattaaaagctgaaccaccataaaataaaggcagtttgtacaaactgaaatattcagtgctttgggtctgggtgaggtggaacaagaaaccctaggtaaattgtagcagcgttagatgtttggcctgtttaaagaaggatccttagagggatggagtcataaacacagggcacactggcctcagaacagaactgagagggctccagtaagcagagtggagacataaagcatcctgccatgtgcttacgatgtaggatatcgtcagcctctcagcatgagtcttaccctgtggaagaaagaagtggaaagagaggagaggagcatctctgagcagcacagctccacgcagagtttcaccccagtgcttctctgtgaggtgtaaatacagctctacagcctgggaggactggcagaggtcaccagtagcaaagagtgatagcgagattccacggtcatttgtggatgaacaggggttgttcattttaagaatattgtttgggtaaacaaacaaaagtcaattttcccgtgttatggaaatgctctgagaaaggcaacctcacacaaatgggtcaaagagaatgccaaggtatggaatgcctgcttgtttgcagaccaaaaatatctctcattcatacaagatagaatctagctggattttggtgtggttctttcataagcatctctcttgtgtggccgactgctcctattcagatgaataactatgctagtatcttgcatagctgatccatgaccctgctactaatttcctctaaacctgtctgtagaatatctgagtggttcaaaacccttttagttccattccaatcttcttcttctatcaaatccaactaggcaggaggaaacaagatgtgtgactcttggaaaaaaaaataccagcgatgatctctgagacctgtgaagtactggccctctttcaaatacaattcgatttctttctcacacccagcctttaaaaaataattagggggatctaatgcacattgtacttctgtgtgcatgtatttattcattcattcaaccattgctctgtgctttgtattgcaggcacttgataccgagatgaaggcaacagaatccagctctggaagatgttcactcactaggagggaggcagacccatagactgactcatatcatcagaacagaatcaccaaggagagatgctccaaactcagtttgggtgggggtgttagcagaggggcaagagggaggggagggagagggcgtaaagcaaagtgtcctggggcaggtagcacctgagccatgtcttaaaaaataagcaagtcaggtggaagagggcaggaagcttagaaggcaacgtgggtgagacgaagcaaagcaaagaggtcaacaaatgtgtggcgtgcggcattgcggaagaacaaagatgttaaaggccaggcctttctccctcagctatggaacctgaactccccttgtgggtgatgacaagcattgatgactctaagctgggtaataacacagtcagaggagtacttctggtagattattttaagaaaacaaggctgaagaaaagcacaacagttagttgttgccaaaaacaatgagggcctaagtggaggcaaaggttggggggagattagtggaggtgagacattcagatatttgagggaaatgttgggtaaaatcgattgcacttgctcgtgtattagaggtgggtgagttcctgggctggattgtcagcgtttcaatacctttcttcccttctatactctcctctgtattgaaggtgccagagccccagattattcacttactagccagcaggatctcatgttaggttcctcccatggaggtccccaagaaagatgcggaagacagaagaaaaggaaacttattattttgcagcaacagtgagtaggtgcatgggttttggcagatggcaaatgaggttttgccaggagcttctgcacaatctcctgagaatctctggtgctgtaaacaggtgagacctttggtaaaagtccctcagaattcctgcaatttgtttcccgaaagactagcagtggcttctctgacttttgcttctttaaggcttttaattgattctataatttcccagttctctgtactaaattctttcttgcttaaaatatctacagtgctttctattttactgaccaaacactgttggaatcaactgatacccaggtttctggcttaggtgaccaggtggacggtgaattagaaaattaattcattcattcagcattcatgatttactgaacatctactccgtgctcagggagtgctataggcaccagacacagggactcctatcaaaatgaccaatgctcctgccctcaaggagcttatctcctagaaggagaaataagtgatataagaaactaataattaaataatgtcatttcagatgataatgttaggaataaaatgacagaagaccatatgaaagacgatgtgtaggtggtagagtggtcctcttagactgaatagagaaaatcttactaaggaggccacatgtgagcctaaatgacctaagtgtccaaaaagctctagtcatgtaaagatctacttttggtttaaagtgagaacaaacttggttggctcaagaaagagactggaggtccatgtgactagagcagagtggacaagaaggaaagtgtcagaagatgagacctgagagttaactaaaagtcagagcatgcaggccttcttagccatggtaaggagttacctacctgatctcatgaccttactgtaaacctacagtgttgaagactggacaccccatgaaagttatatcgtacattaaaaggtacactggggctaaggggcaacttgatcagatttgtgttgaaaaatagtcactagagaaaccagcccatggaagcaaacagagaaggtaggagtgatggagtaaatattaaaaatattaaatttggccgggtgcagtggcccatgcctgtaatcccagcactctgggaggccaaggtaggcggatcatgagttcaggagatcgagaccattttggccaacatggtgaaaccctgtctctactaaaatacaaaaaattagccaggcatggtagtatatgcctgtagtaccagctactcaggaggctgaggcaagggaatcgcttgggcccaggaggcggaggttgcagtgagccaagatcacaccactgtactccagcctggcgacagagaaagactgtctaaaaaaaaaaaaaaaaaaattaaatttaacatgcttctaggacaggcagctggcaggcaattagataaataagactgctggagaaggtctgggactgaatatggaattaggagtccgtacatgggtgacactgggtacaccatgagtatatgcaataacacagggagtgtgggtagaaagaacagagcactgagttatggaagactttgtagaacaactaccctgaaaggcagctgcaggaaaaggcccccacaaaaggaggatgattcaatgggaatccggagagtgtggggtcacaaaagtctaggtagtttcactaagagaaagcaaaacagcagttaacacaggactgagattgggaacaaggaaaaggtatccactttcaccattcctattcattattgtattggaggttctagctgtagcaattagatttaaaaaacccaggatatatatagaataaaagagaaataaaacggtttttattcatagatgacaaaattgtctacatagaaaatctcaaagatatgcaaacaagctactagaattaataaaggagcttaacaagattgcaggatataagtaaatatagaaaaatcaataattccatatggtagaaataaacaatagaaaatgaagattaataagcaataccatttgcagtagcactgaaaaaatacttagaaataaatctaacaagatacatgtaagctttgtatgctgaaaactataaattattagttataactataaattattaatgaaactaagtaagacctgaaagatggagagatatatcatgttcatggatgagaaaactcagttgtgttaagatatccattctctccaaatagatcttagattcagtgcaataaatcccaattaaaattcaatttccatcaaaatcccagcaagctattttttgaaatgggaaattttattctaaatttgtatgaaaaatcaaagaaagtagaatagcctaagcaatgttgagaaagaagacaaagttggaggccttacctacctgatttcatgacctcactgtaaacctacagtgttgaagactgtacactctatgagtatatgagataacacatcccttccttggaggaaggcagttcacatagatcagtgggagagaacagaacccacaccttcaacacaagtgctaaggcaattcaatggagaaaggacagtcttgctaaacaaagactggaaccatatgtgtaaaaatgaacactgataaatacactggaccctatacaaaaagattaacttggaatgggtcatagagctaaatgtaaaactcaaaactataaagctaacaacagaaagacaaagaacccaattcaaaaatgggcaaagggctcaaagagacatttctctaaagaggatatgcgaatgatcggcagacacacgaaaagatgcccaacagcgttggtcaccagtgaaatgcaaaacacacccacaataagagagcacttcacacccatgagaatgacaataacaacaacaacagcaaaaccagaaaataacagatgttgctaaggatgtgaagaaacttgaatactcatatacggctggagggatgtgaaacggtacagctactgtggaaaacagtttcatgattccacaataaattaaacacagaattgtcatatgacccagaaattctactcctgtgtaaaaagtgaacacagatcttcaaacaaaacttgtacaccgatgctcacagcggcattatttacaagagccaaaaggtagaaacaaaccaaatgcccaccaattaatgaatgaataaagaaaagatggcatattcatacattgaaatattattaagccataaaagggaatgaagtactgatacatgctccaagatgtagaaaccttgagaacttatgctaaatgaaagagtgagacacgaaagactatatgtaacacgattccattccatttatacgaaacactcagaagaggcaaatccatacaggcaggaagtaaattagtgcctgcctggggctggcgaaagagaagaatggggattggctgcttagtgggtatggggtttttagggatgatgaaaatgcttttttttttttttggacagggtcttgctctgtcacccaggctggagtgcagcagggtgatcatgactcactgcagcctcatcctcctgggctcaaatgattctcccacctcagcccccctagtacctgggactactagtggacaccaccaccccccagctaattttttatttttaattttttgtagagacagagtcccacgaggttgcccaggttggtctccaacttcccggctcaagcgatcctcccaccttggcctcccaaagtgctggtgttacaggtgtgagccactgtgcctggccatgaaaatgtttttgaagtagatagtgatgttggttttgcaatattgtgaaggtagtgaatatcactgaattacatactttaaagtggttaaaatggtaattttaatattatgtgcattttgcaacaataaaaaaatctgtaaaccttatagaagaaaacaaaggagaaagtctttgtaaatttgggttagaaaaaatgctttatattgcacacaaattgcacaagccataaaaggaaaaattaacacactggacttgatcacagttaaaatactctgctaaataaaagggaaaccacagaaagggagaaaatattcacaaaatatgtatctgataataggctggtatacagaatatataaagaatgtacacaactcaacaataataaaacaaacaacccaatttaaaaaaagaagcaaaaaaataggcaaaagttttgaacaggtactttaaccaaagaggagatgcagatctaaatatggacatgataaatgctcagtaccattaatcattaggaaaatgcaaatgaaaactattacacacctttcaactggccaaaatataaacaaaacaaaatctgacaatatcaaatgctgacaaggatgtggagcaacaggagctctcattcactgctagtggtgatgcaaaatagtacagactccttggaagatcgtttctgatactgttaaacataaacttcatgccacctggcagtcccaactccttggcatttatccaagagaaatgaaaacatatgttcatacaaaaacctgaaagtgaatatttatagaggctatattcatggtcactaaaacctggaaacaacacaaatgtccatcacctggagagtggatacagaaacgatggtacatccatacaacagaatgttactcagcaacaaaaaggaaaaggccactgatagttgcaacaaatggacgcctctcaaatgcatcatgccagtgaaagaagccagacccaaaagactaagtattgcatgtttccactaataatacattctggaaaaataaaactatagggacagaaagcagatcagggtttgccaggggctggggtcagaaagaaaatcaactgaatggggccaaggaccctttttgaagagatgaaaattttctacacattgatgtgttggaagttctgtaatttgatacatttttcaaaattcatttatctgtactcctaaaaaaggtgaatactgtatataaattatactttcataaacctgactttaaaacatgactgagactatcacttggttaaggctaaccaaaagggctttggcaatcctattgggaacaatttcactggtaaagcctgaagcgagactgagataatagcgtacatttattcaatgaggtagaaagcaaggcagagaataggaagcgggtgcttctgctgagtgctccattaatcaagttaaactgttatttctttccccctaggcttgtaattcaaaccagggaaagtttgggagagagggggaagggggagaatggagttatgattcagaatctccaagggcatttgtgtttgaaaattttatttatgatatttaaatttagagaaaaatccctatttgtcaaataaaaactagggaaaggaaagaatgataacacctttggtagatgaggatatccagaataaaaacatgactcactggggccatgctccctggggattctttggtgtggcgggagtggcgatagagacaagattttttataataaaacatggcaaaggataaaacaattagataacttctgtccccaaaacttacacttatcttgtgtttaataacagattcagtgttgatagagtctgagagtattcccatcataatgtaagtctgctccagtggactttttaccactttgtgtttgagcctcaattagtaggaaacaatctgttctaagataagaaatcaaaatctaattttgttatttctccctagtgagtggacactttctttgggattggagaaaagggactgaattggtttccctttaaaatgccttcagtatcttttggattggtgcaccaaattctcactctgcccagtgtggaggtgactgctgagtgccgaaatgccaggaccagaaaatcaagctgaacacatgcgtcaatggtgaacaattatagctcagaatccatcctcgcaggatctggggtccctgtgattgtatcatccagacatacatcctcctctcctcccaactgcagcaagtccaagccagatctcgcaggatgagtaagcgacatatggcatgtgtgaaattccactccaccctgttgcccttcccagagctgctgtagacggcagcaacgattatagcaaccttgactccataaggaatgtgacaatttaaaccctgcagactgtttagcaatgagttattccaagcagtaagttgtaccctagagccctggaatgaactgaagaagcactgggctcacatcttaggagatctgttcatcaggtagaaactggcttcatcggcaaggattgagatttttctgctatcgtttttgatggctagtctcatcaaagagcaaacagcatgtctcagattacagctatcagtcctttggcattccgcaggcttctcacattcatgccgagtcgcagggctgacctggcctgaattgtgggatctgaactctcccagaaatttaagaacccccaaatttgtccccaggtcatggtttgggattggggccacccagaaaattcgacagactcagagactccttgagaatgatgctttaagctgcagtctcagataccccgaaattatatgagtacagtggaatggaggcagagaaggggatgcgcggtgatgactttttcataaaggccctaggatccaggtcaagtctgtagtggtccccatgatgattctgggcttcaagggtattctggggaaagccaacctgcagggattcctgagtgcctttaaccacagaacccctaatatcatggaataaaagagaagtaaaagttattggacaaggaatggtaacttttagttcatgaaatcctttgtgacacaccatctcaacttttgctttggcaaattttttttccatgtcaacaactgctgtgactgattttgaaaccaggaaatcaacttgaatgcaaataaaaattcaaatggatgcaaatttatgaaaggtaaacttttaaaaaagtcttagaaaaactgtcacacaaatgaagattctagtattctagtggttcagaattaagtccaggttttaaatgttctttataaggatatctctttttttttttttttttttttttttttttttttttttttttaagaggcagggtctccatacattgctcaggctagactcaaactcttgggctcaatggatccccctacctcagcctcccaagtagctgggactacaggcagccaccaccatacctgtctaggacatttcttgacatagtttgagccttttatctgacggttaagtctgctgggttcagtactgtttcatttctatagataatatatcctaaacattttcaagttacttgagattattagatgcagtgagatgaaccaaactaaaatatctcttgtagccctttcactagctgtggcttatttatattaaagaagcacacagtagtgacacatctgtgacacagggacttgacagctgctaggtggtacgaaaaggttggttgttttgtttattttggacaatgcccatcaatcacgagaatgatgttagaaccacctcttatatagctggcccttactgaaacaagcactgttgttccaggaccctgtcagattagggctccatcagactgaaagagtagctttttcctgctcagggtctaataaagctcctggcatcttggcacacccttgttgaccctgttgccattctagagagcagacactacccagtggagccaccagagcttccccaaacccactgcgaattccgacttgagacactgcaaggctcagcccattgtattttgaagtaggattttccttaatgaaaaaagtctttttcattatttctgtccaatcgacagataaagaatttatgaattccaagtcacaaactgggttagattgtcgcctgccactcttcctctccctgccatttttttttttttgagattctgagaattttcccattataaaataagtccactccagtgcagataattcctcactcacatgctctgaaattcttgcttctgcctaaaccctgtcctgtctctgtgattactcttttagacataatctttgtggcttcaccccttgttgcagaataagacagtagcccagcaggccacactctcacaggggcaggcctgggactttgcctataaaatagaaaatcagctgcccattttttcaattccaatgaatgtgtaactatcaaagagcttattccatctggtcctgttcacagaagactgagagacgacagacaggaatgttgatggccaaaccacttaatttctattgagtctaaaaaagaaatgaagaacagttctaggctgccagaaaacagaagataagcatatggttgttaaaattacaagaacaactggggcagaggagacaagctgcttgcaatggcgtaaggatttctacgttgcgttttgatccacacccaccctggcaatgactgctattgcataagccttcaattcttcaggcctgtgcagatactgatttagaattggtctctggcttgttatgaaacgaagctctttcatggcacaaatgtggagcagaggcgaacctggtttgaagatgcctatgagacctatattctcatcctgcccctcgggcatgagtcaccacttccccctaaaatatggaaaaatgctaaagtgactttcatgtgggatgtacaattggtaatgactgagttgggaaaaacacacaactccctgaactatccacatgccatgagttctcaaggcagtcttgctgagatattataggaagtctaacattctgctgacttgtcccatatgtcgagagtctaacaattttacaaacaagttgttagagggaaagaggacagtgtcttcatggttgtcagagagacccaagcaaatgacagcatgtagctccttggtatcctggcatcactggccttggaaaattttgctgcaatgatagctctgttctcctacatcaaaatagggacttaatgaatttgatttgtgagtgctattaaaaacccatcttctcttctttgaacaagtaagcctggtcaactgcctgtgctgaaaaccactgaagtgtgtatatcatatgttttacaagactctagttctattgagtcgggttgaaatatgcttaagagcatgtgatggttaattttaatgcatcaacttgactgggctatgggatgcccagatagctggtgaaacgtgatttctgagtgtgtctgtgagggtgtttctggaagagatgagcatttgaattgatagacttgaataaaaaagatccaccttacccagggtgtgtgggcatcatctcatctgttgagggcctgaatagaatgaaaaggcacacgagggtaaattcactccctctcaggttgaattgggacacctatctatctcccgccctcagatgttggtgcttctggttcttgggctctcagactcagactgagacaccaacggctttcctggttctccagcttgcagacagcagatcgtgggatttcctggctgccataatcacatgaagcaatttctataataaatctccatatttatgtataaaacatatattctctggggaccctcggctgataccaggtgcacttgttaaaaatcatttagagtggagaagatgagtagcttatctttcatattttgcctctgacatggctattgttaaactcggaaaacctgtatcttcccagacatgaagaaattcaccttcaactaccacaaagaccatgatttggtgtttacaagtttatttagaaacaggtattttttaaagtggttccatattcttttacgttcctttaaggaaatataataatatgattataaaggaaaggtggattgactcacggtcatctctatgagacaggaataagcaaggggttgcacttacaagctgtccttttgggatttttttaaaatcatattcacatatatatatattacatcgtgtaaaagacttgtgatggttaatactgagtgccaacttgattggcttgaagaatgcaaagtgttaatcctgggtgtgtctgtgagggtgttgccaaaggagattaacatttgagtcagtgggctgggaaggcagacccacccttaatctgggtgggcaccatctaatcagctgccagcacggccagaataaaaagcaggcagaggaatgtgaaaagactagactggcttagcctcccagccttcatctttctcccatgctagatgcttcctgccctcgaacatcagactccaagtccttcagttttgagactcagactggctctccttacccctcaagcttacagacagcctattgtggggccttgtgactgtgtaaattaatacttaataaactcccatatatgtatcctattagttctgtccctctacagaaccctgactaatataagactgtagagaaaaacttcatgtatgtaacagggacccttgcataacatagagcttagcttataccagaagataattgtttgatgaatgaacaaatcctttcagggtacaataattcaaagcttttaatacgtttagcatagcaacaaaaatccatggagtcaacacagctacaggcagccgatccctgtaaacatccccagggcactctctaaaactgtaaattcggctcctattttttacattctaacacaccctctgttaaggccactaagtcactcatctctcaggcaggatgaaacagaaaatagcttaaggactagcgctttcagcccattgctgtaggttcaccaacctcaatgctacctcttattctagactggtatctgcagagtgagatactattctctctagtcccagatcatatgcttcttccataggtataggtaaggtcaccaaccaaaaaatggagtccatactctgacaaatacaatcatattcatgggaacattttaatttgagtctatcctagaaaactcaggtcatttggttgttttgtagtgttatgttccacggttttgatatggctgtagctttctagagatttccttgaatgataggaaaaattttaaagagaaaaactgatttccacattcgagttgcacttcagatggaatttgtgggctgccaaattctagcctctgcggtaggttattctgctcacagctctttctaatattcagtagagcgggcttctcaagtccacccacgaccccaagagtagaggcatgtggactgaaaccatggtgtctgggaagagttggcacacaatgtttttgtggtttctctttttgtttacttgaattaacataaaaacagtgctttaaatcatttaccaccacgcaaatcaccacttgaggatgctgggtctctgtttgaccccttggtcctggtgttcactctccctttgtgcctgccaccctgcaggggtcctgaggaaatcatgaaggtcactacactttaaatataagtgatgggagtgggttagtggaaataaactcccacaaatatacaggagatgagtatgtgtatgtacagcatgtaaaataccttctccctgcacatgtctagtggtgaccctgagctggcttctcagtgccatccttaacttgaagaaaaaggggaaggaaatgataatatatgcttggagtttcagataaataatagcgaccatcacaaccatctggggagtgaggtatgatgaggcttattttatggatgaaacatcaaagctaaaagaaataaaaccacttctacaatgttttataggacaaagtatgtatccttttccaaatacatatatatataagcaggaagtatgctatctttgaggtattctttaaggcatgatctcggcttcttctagttcgttcatatacagaatttctacgacaccccaaatgcaccccaagaaatgtacttgggatagctattcacacgggggccaattagggcagctggataatgctttctttcttgtgagtataaaaaggagaacatgagagggatacaccaatgaggtacaccttctgcccagttttggggagaaatatgcaaacttatttttaatgtgagctataagtgcaaactttgtttctctatattgtatttgtaaaagttctcaaacattctcccagatatgtgtatatggtattataaaagaaatgcataaaatattatgcctcagacttggagtagaaacatggcgagtgttccaaaataatttttttaaatggagctgattgtctaagaacctggaatgagttttgaggaagaaacagagggaaaatcatttttgtatttactaaaatgaaggcaaaactatgaagtctttgtgtctgggacttttggtaaagctttcagtgaacaccaaatggatgaaggaaataaagatgtgttattcacatgttactctggttacttataggagtcagagtttaagaatagtctctgaaatgaaatactccatacgtgaatcatccattacagtcttcaaacaggttctatactaaagagtgtgacaagcgtttctttaaagaatgaacaatcaggtgtcatggaagtacagaggggagtggttgaggaagtcagcccagaggaagcagcacctgagctgagctctggaggtggtgagtgatgggtcagcaagggggtggcggagtggacattctaggcagggacaaattcacaggaaatatgaaaaagactaacagtaataattgttcatttttaagcttggctacgaaatgcagtggtcccatttgaactaaaatctaactctaagaggtcactgaagtagaaaaatggaacttcttcaccacatcttcttcttgaggggaagtaagcctgtcctcgtatcattagactggcccagtgacatgctcctggctacagctcactgtctcagggaacggcagatgtctgaagccaggcaaggaacacagttggtgtaattcacatatgggatattcttagcattgaatactgttttctttcagtcgcttagggtatagtatggttctttgtcaaaagatgacaaagcgctgccttggttattcagtttgtgaaatgaatcacaatgctttaatagaatgaaatctgtctactgtgaatctgcatttgaagttaagagattctactctcaaagtgtttctcttaatgggaaagatgcccaactagcaattcttgtggaggctacagaaatccccacaagaaagaggaatgaagaagctgcacaaagagaaatagagaagagagagagagagagagagagagagagagagccttagttagtttactgagagagaacgtgctagtccctgattccaaatgcatccttgcccttgagtgctgtgaaactctcctgtaacattaaaatgctttccactagaattagtgggtttctaagacttaaaataagagcattttatatacacacatttatatgaagacatcataaagacaataatctcgttatatatttatatacacacttaaatgacataataataaagaccagtctaatggtttatttgcctctgtagaaaccatcagagactattagtttctccaagcattaattgctttgtctggtccagggcatagtttttccttgaaatacagtcttacattctcctcaggattttaggagctattgctgttttcaggttagtaagtgaggccttcccctctgaaggcgtcaggtttatgaagagttcatttgaagctgtgcatagggtaaatttaccttcaactacacaactcaggtgtgagacgtagataaagcttctgctccagtacatacgtggacacacacattcatctattttggggctccacttaatgtatcaatgtttatgagtgtacctcagaacagcacatagcagacatagcaaacataagcactttacaccgagaacactagattttattaaccacttgaaatccctggagggaaatgtcatttcattaggaggctccttggctgctaatcaagggcttttcatttccttaagtacattgatctggtaacaaattttcttctctgaaaaaccattcgggaaagcattttctaaaagcaaagtaagaaaggtctatttatctttggtaaatacaaacactgaagaatcaccaggaattaagacagaatagaaaccatgtgtctgtaccctcataagatactgggactcccaccaaatccatcatataacttattacgcaccaaagtcttccttcaccaccacacatcctatctaagatgtttgctgttgtcatttacatctgggaccctagttagcatgaagatgccatgttcttttagttacttgaagtaaactatggtaagttgtcaaaagatgacaaggcactgccttggctgttaggtttatggaatgaatcactgtgtttaataaaattaaatgtgcctttgggattctcagcacatagcacaataaatgttaagtcaggtataaactgacattttggattacaacactgttgtattttccactcaaatttagctgtttctgaaaatgtatatgattcaaacaaacacaggagttcaaatcagtgcatttctcacattccgttctgttattcatttagtccaatgttcaatttaaagcatgcatcttaactaggatgttcctagtttacagtaagcagtgtcatgcagtagaaagatcatgggtttcatgatcaggccagattctaatttcattcttcccacacagctctatgtgaccagggcgagtttcttaactcattgagtttttgcttccttttaggtaaaaccccaagaataccatctgactgccatccaaaattatagcaaataataaataagattaagaattaatatgcctacacctctgcctggcatgtaggagacacacaatagaagtcacttcttccctgaaactcccacatttatgaccccactatcttgcctacagctaaatcctttgtgagctttataaatctctagatttttgatagcattaaagcatctccagtaactttttttaaaaaaggatcataagttaaaatattctattttcctttactatggctatggtttgaaatatgccccaaatttaatgtggtggaaatttaacccccaaattcatatgttgatggcatttggagatggggcctttgggaagtatattagttcattctcaggttgctataaggaaatactcaagactaggtaatttataaaggaaagaggtttaaattgacttacagttctgcctggctggggaggcctcaggaaacttagaatcatcatagaagatgaaggagaagcaaggcacatctcacaaggtggcaggagagagcgtgtaagagaaagcgagggagtaccacactgaaatcatcagctctcatgagaactccctcactatcatgagaaaagcttgggggaaactgccccatgatctaatcacctcccaccaagtcccttcctcaacacatagggattataattcaagatgagatttgggttttggacacagagccagaccataacaggaagtaactaggattatataaggtcgttagtatggggctcccatgatgatggactggtggctgttgcaggaagtcagggaccctgaatggagagacctgctgaacccgcagcagaagaacataaattgtgaagatttaatggacattgttcccaaaatgaatacttttataatttcttatgcctgtctttactgcagtatctgaacataaattgtgaagatttcatggacacttatcacttccccaatcaatactcttataatttcttatgcctgtctttactttaatctcttaatcccatcatcttcgtaagctgaggatgtatgtcacctcaggaccctgtgatgattgtgttaactgtacaaattgtttgtaaaacatgtgtgtttgaacaatatgaaatctgattgtaaaacatgggtgtttgaacaatatgaaatcagtgcaccctgaaaaagaacagaataacagtgattttcagggaacaaggaaagataaccataaggtctgactgcctgtggggttggacagaatagagccatattttccttcttgcagaaagcaagtaggagaaatatcactgaattcttttcccagcaaggaataaccatggggaaggaatgcattcctgtggggaggtctatgaatggccgctctgggagtgtctgtcttatacggttgagataagggatgaaatacgccctggtctcctgcagtgccctcaggcctactaggattgggaaattccagcccggtgaattctagtcagaccagttgtctgctctcaaaccctgtttcctgttaagatgtttatcaagacagtgcatgcccagcaggacatggaccctcatcagtaattctaattttgcccttgccttgtgatcttgctctgcctttgccttgtgatcttttattgccctttgaagtatgtgatctctgtgacctactccctgttcatacatcccctcccttttcaaaatccctaataaaaactcgctggttttgcagctcgaggtctccatcacggtcctatcaatatgcgatggcacccctggaggcccagctgtaaaatttctctctttgtactctttctctctatttctcagaccggctgacacttagggaaaatagaaaagaacctacgttgaaatattgggggctggttcccccagtagttggctttataggaagaggaagagagacttgagctccaaagctcttgctttctcaccatgtaaagaagaaggccctcaccagtcttggacttcccagcccccagaactgtgagctaaataaacctcaattctttataaatcattctgtcttggtattctattagaacaacagaaaacaaactaagataaccacttaattttgtatttttaaatctcactttttctcccctttctcccttatgcagcagaaaaaaatcatggtaaaataagatgcttagcacatgttgggtatttcagattgccatttgccacatttcctttccaccaggtgccttttagctgaggttgccataagcactgacatctcttaagcaagttcatagtgggccactaagggagagacacagacaaggcttaaagaaacccacatcacctaccatgatgattaagatcaaaatctacttttaaacataaaactgaacacgttttaactaaagaattaattggcttcatgaacattatctttgtaataatttgagaaaatctaaaaggtatggaaaaaatgtgacaacttttcattttctttccttgtgacaacttcatttatttcttgcagtaaaagcaaaatcaggctaagaacatcaacaggagtctggagatttgcaacagtctctattgatgccttgaaattactgattatttattagttcctgtaaaacctttgaaattttctcatttttgagattgtagtccacttacacaatataatgagtatatacaaggttttggtgaacccaaaaggctagtcgaaaacaagcatgagaaaaatgttgcaggaaattgccaagaaaacaacaacatacttggcttgttggaggttaaggagtctattgtttgtaaggaggtttctgctgggtctttaaaaacatatactaatggccataacgggacttatttcagtcggaaaacttgaagacaaagaattcattctgtgaatggactgtgactttcttgggattccttagggtagaaaataaacactttcagtggttatttttcccatgagacaaaactgaaatatttcagcagagcataccttatcctcccagctgctcctccacgctgtgcctgcctctctcttatctcttaatccacttccctcacaccctgcgtttcccacactctgtgcagttcctcaaagtgctgggcgattttacaactccagcctttgccagtctcgcttccttgctaggaacgtctgttctcctctgcaagatcactcttccctaaagcattcctgactccctcattctcatggaaaattgaccactctctcttgtttgggcccccatgattccccataaatatgtgtattctagaccctatgatacatattgtttttgctggtttatgtacccatctcctttagtagtttgtaagcctcctgaggtcagggatcatttttaagtcacctttgtttctcaccgcccagggcacaatgggtgacctataaaagatggtgaataaatgggagcatatggcagaggcaatagaaacttggagctacagggaatgcataatcaacaaaaaactaaggtgctgatggcaattagttccaaaagcaggtgcttagagacaatgaacaggtaaagaagcaaacactgtgagtcatgcagagagatgaatggtaagtaaacatgacactaagtatttaaatttttaacaatatgctcaagatccttccataatttattattaacatatttttcctttttaacattggaggttgcttaaaggtggtccatacataaaaggtcacttgtaattgtataagcaggtgcaggttccagaaaactttccactacatacgaaaaaggatcacacaaaatataatgagcaaatggagatggagaagagcaagagaaagaaaactggctcatttattcgggaagcaactgttgaaccctataagtctcaaagactgcaccagctactggatgaataaggttgatatggtttttcttcctaacaagcttgcattccagagcagaggatgatggtaaataaacaaacaagtaaacaaattaatagttgacaatttcgataatgagtgccatgcagacaataaagagagcacgtgacaaagcagtgcctgagggctggctttagcttggctggttagaaagggcctcacatggaactggcactcacgctgaagccccattcaacagaagagttgtgggagcatctgcgagaagaatgttcttggtgttggtgaaaagggtcaaactctgtaaaatatttggagaggcttgttctgagccaaatgtgaggaccataatccataacacagcctcagggggtcctgaggacatgtacccaaggtggctgggctacagcttggttttatacattttagggagacataagacatcaatcaagacatataaggtgtactttggttcagtctggaaaggtgggacaactcgaaggtgggaggcttccaggtggattcaaagactttctgattggcagttggttgaaaaagttaggttattatctaaacacctggactcaatagaaaggagggtctgggtgaagataagaggtcgtggaaaccaaggtgaagcctccagtagcaagcttcagagacagtaggtggtaaatgttccttatcagacttaaaaagatgccagactcttagcttattctctcttggatcatggaaagggaaaggggttctctgtagaatgcagactttccccatgagacagctttgctgggccatttcaaaagatgtcaaagaaatacattttggggtaaaatacttcaacttctttcagggcctgctgtctatcttgttggcatcattgctataaacagtctgttttgtcggcagatttctgttttaatgttcatgctggtcagtgcctgaactccaaaggtaggagggtataaggagggatgttcaacttccacttcccactgtggcctgaacgaatgttttcaggtttctttggaatgcccttggctgaaggtgaaggtttctttggaatgtccttcgctgaaaatggggggtggggtccatcagtcgggtggggggcttagaattttatttttggtttacatgagcatacggaatgtgtgagtctgtgcagtcagaatgtgttttgagtgcttgagagaccaaaaggaagctagtgtaggtgggaggacaggaaggattcaaatgatgaggctggaggaggagaaagaaggcaggcagctaacagagtgctttagaggtcccagagaggaatctggatcttattccagatgcattttaattaaaggggtggaaaaagatctgacttctatttttttttttttctttctttttttgagatggaatctcactctgttgccaggctggagtgcagtggtgcgatcttggcttactgcaacctctgccacccaggttcaagcgatcctcctgcctcagcctcccaagtagctgggattacaggcacctgccactgtgcctggctaatttttgtagttttaacagaaatggggtttttggccaggctggttttgaactcctgacctcatgatccacttgcctcagtctcccaaagtgctgggattacaggcgtgagccactgcgcccagccctgacttctattttatagacaacactttgcctgctgtgtggatacttgatactagggggcaactggaagctgggcaaggctggcaatagtccggatgagagatgacggtggcatgaacaaggtgctgggagcagggaggagagcattacaaccacagcaactaccggagtagagagtatgcagaggaagaaaatttccagaaacactatacaaattgaataaaaaacagtgtatgtatatgtgtgtgtgtgtgtgcttgcaagtgcaaaagagagagagaagcattactaagagcaacagcaacagggggacccagtaggtgttgggccgtgactacagatccggtgtgaaggtgccaggctttgcagcttcaaactgcacacaggcagattctgcagggccttgagccttgtaggacatggtatggggtttcagtgatgtgaaaagcaatgaagaatggctactgacaggttgtagaggcatgagagcgacaggatatatttgactttgagcaaattgcatttattttacagtaaggactgtgaactggtgggtcccaagatgggagtccaggctcgccatgatggcatggctgccaagggaatttctcctcctaaacacaaggtccacttagatccctctggtggctgagatcactgcttaccttgcggtgcacttaactaagcccttgacttctttacaaaactcttagctcactgaaggcagccactgcctgtgatgtatttttcaaacagttaatagtatttcacacacaatatgcaagaaatacatatttcctggatgaatgttccacgttacatgatcatttttgccctggtgtgaggaagcttgcctcttcttcctctgcccttcaacctcaggtccccctcttgtttcccctccactgagggtggtggtggggctgtcttccctcctcaaatacacctgacacctctggattggtggttaagcctgaacataattacagttgggcagctggtacaatttgttagtacccatccgccttctcttgtagagcccctgggactcttgtagtcaaacctgctcacgggtctagtgcctacctctatgccccctcatccctgcctgtgccaatgcactgcacgccaggccagtggagaggtgggacacggaaggaatcttgagaagctctcaagaaccttaaattattatgttaaggtataccatgctaattagactaaaggcacgtccctccacctggatttgcatttttacattaggggaaacacggcattaaacatttttaaagagcagtggcctagaataggaatgatgggatctgccttctttcaacaatgtgtataatatagacctttattgagtgcctgtgtgtgccaggcaatgtcgggtactgaggttgaaaaagagataaaaatgatatgcagtcctataaggatattttaattcagttagggagacaggtacatggatggatcattacagtactgtgcaacgtcctatgcttatttccttctggaatttatcactatctccaattcaatatactcacagctttaattcataaacaaaagaccacatgtttaatatactgtcttcttatttgtttagaattgagttatttcacagattagtttagaaataccagtgctattgcataggattattttcattattcagttttcaagttttttatcttgccagggtctttaaattcatttatcatccttcttcttgtttagaattaaacctccagttttaatggtatttttatgatttctaagcagacatactcagaaactgtaattggagtgtggacctaggtggaagatgtgtgtcacctccaaagtgtgaaaaatcagcttgtccatttttacatttttattaatctatcaaatgctatgattgtgaattaaatataacctcttcattataagcctttaattttctccccattttagtgttgtttgtacaatttagaaagggctatatttaacaatatggggttctttaattttttagctatgaaataaagcataaaaagaagataaaggtctctacaggaacacagattattatttacaaagattaaccacaagctttccatgttttccatcctatttattgtggtctgcaagataaggtgaagtatgcaatggctaactcttgtgttatagttaattttaactctcttatcaataagcagatgccttttcaagttataaaaagtgtgccattattactatcaactggagagaatgaggtcattgttctcattatactataaaaagccggagtgtaacagaagggcaaaaacatacctcaagaaaaacactcatgccaccaacaaaatacctttgaagcaaagaatatcacattgaattttccccacaactaaacattagattcaaagaaagagattaaaagccctgaaaagaagtggtctcttagaattaaaggaccacgtttatttttgtgatgctccgtttattacttgtacagtaagacttttacatgctgatttgtaaacttttctataaagcaaaaaactaggatagaaacatccagctgaaacttactattacatttgaagatttgaaatcatcaccactatcactatatttgcttcatcaaatttaattttaaagatttgggaagtggaggcaggcaaagaattatttaacagtttactaagagaaaacgccttggtaagagcaaatagatcactgaacggccgggtgcggtggctcacgcctataatcccagcactttgggaggccaaggcagtcagattgcttgaggtcaggagttcgagaccagcctggccaacatggtgaaaccctgtctctactaaaaacacaaaaaattacccgggcatggtgtcaggtgcccgtaataacaactacttgggaggccgaggtaagagaattgcttgaacccaggaggcagaatttgcagtgagctgagacgaagccactgcactccagcctgggcgatagagtgagactctgtctcaaaaaaaaaagaaaaagaaaagcatatcctggacggtgggttgtgtgtactgagaatgggggaaggatgaacgggaggggcggacagcagaagaggaggagccgatgctttgggctcaatctttacctgccccgcctggtccatattcttgctaccttcccagctcccaaaatgaaagctcagtttcgacattaccatgggcatctttctgttgcgttttcctgtctttgatatggctgccaagatggagtaatttagagttccctttattattcaaagagaatagttcacataagtttagttatcaacctccaactcaagtgacggaaacgttaagaggtgcggtgacaacagcgcaccgcggccccctgcacaggaacaaggggcgggaatttcagggactccactgtggctgctgcatctacctgctggcttccactccttgccccactcccccatcctcatcaacacccactaatttaactctattggaaatcatcctcctggttgaagtgtcatatgcaaacctcagacctaaaatcagcagatgtattattaccggtctcccttgagaactggttaaaaaacaacaacaaaaataagaacaaaacctgaaagacttaggagatctataggctttaacgggtattaagttctggaatgggaacacggaaacgtacagaacaccatttcaagaacatccttcctaaaggaatgagttcatccactcaggacattttcaaggcactcttagcctaacttttagacgtttccttccactttaagcacgttatatttttctttagtcctcgataatgtgacctctggttctggtctcagagaacgctagtcaagctgtggcaccatcgggttttaaagtctgctcccaattttttatcagatactgtactatgaaaattctagctctttcttgataaacatgccttttaatttatcttacacaaggtgctgagatttttcttttaatgataaaacagggttggctctgaaataccaactgtccacaaactggtttcaaatggcatgatgtaactaggctttttgccatgggtctctgtgaactctcgcccaggaaatgcaggttttgatatgtacaaattgccaaaggaaattccagaaggcctagaaagcctaaaaaatgcagccatatttaagagtgttttctgttttctaattcttgcattggtttctgtggttaaaagattcctgtcaccagccagttgtcattgtaagatactgattaccaaggagtggccggggttgctagcgttccctgagtaccagtgctgagattaaatgtgccagtgttcccagcctctcagcaaacaaaccaagcgcagtgtttaccaggaagctgaaatggagaacctgtcccaaatcagacttaatttcatttaattcacttaccctaattgttagtaagaagactgaatttaaattaaacactttgccttggaactgggttttacttaaatagaactgtccctcctatggaaaacaagtatacactcacatgcatattgcacttaatgcacattcaattttgtaagggacatgagccccattcaagagcgtcatgtttcttcctcctgtttcttgttccatcctatacagtggaggtaataacggattcgcttgctttagttcaaatcattagaaagaattatttctaggcaaaacagagacagtttcacctcatttctcttttttctccatctcaaaattgacagttctaatctacataacaaattatactttatgacaagctacttgtttcctatcttgaatattgtcttgaaacctcagtaaaactcgtagattactgccaccttgcaatttattttatcactattgctaccatatcctgaattgccagcaccaataaatgtacatttcttaatacaaattgcttgtttcagtgtgcattctatgcccaagcattggcattacagaacaagggaataaaggcaggactctgagttatgagaaaataacacagtgctctaatgaggagagatctccttcaggagtaacgcaatgtatactaaaatattaaaggtttattttattttattttattatttatttatttattttgagatggagtctcactctttcacccaggctggagtgtggtggcgccagcttggctcactgcaacccccgcctcccaggttcaagcgattctcctgcctcagcctcctgagtagctgggattataggcatgcaccaccacactcggctaatttttgtatttttagtagagatggggtttcaccatgttgatcaggctggtctcgaactcctggcctcgtgatccgcccgcctcagcctcccaaagtgctgggattagaggcatgagccaccgcgcctggccagaaggtttattttaaagatgaaaatagaacttcctattagcaaagggctaaataacttttagctactttaggctttgagttatgacaagatgatccctcttcacctgatatgaaaacaggcacgagtagagagaaaatgcaccagggtggacggacttcctgtcatgtctgcaagatctatgtttgcatatcttttatttcattttcatctataatacagtaggtggacaatcttagtccaagaagtcagagggaggaatgatcacatttcttgtttaagtcagctcaaatttgagttcaaccattggactgacaggaaatgaaacccaaatcatccctgcttgcttgcttccttgagctctattcctgtcatgcaaaggtcctgacaccggtctaggctaggattgaagggaggtcccaggcattaggacagatgtagtccattatcgactctctctaaattaccttcaggtctggggactctactgcttgttgccatacttggctctgggagtccccagagaggctggggcacctacacctcgagggggcaccgtctctaggggcattacacagctaaccctcaggggtcccaccaactattcatagcacaaatagtgtcccagctctatctcatctgttagaaaatctctccctcttgaggcctttaaaggccaagtcctttcttcccttccttcgggacattccctaatctcagttcatttcagcctccataaaagacaataagtgcctctaacttccaacaggaatttagttagaggggtagagtaacaaatagaaattaaaagcttctactttcctttctcttttcttttctttttttctttctttttttttttttttgaggcagagtctcactctgtcacccaggctggagtgcagtggcacgatcttggctcactgcaacttccgcctcccgggttcaagcgattctcctgcctcagcttcccgagtagctgggattacaggcgtgtgccaccatgcccagctaattttttgtattttcagtagagacagggtttcactatgttagccaggatggtctcaatctcctgatctcgtgatccacccacctcggcctcccaaagtgctgggattacaggcatgagccaccgtgcccagccgaaagcttctactttctaaaagacaccccagctcctaaaatttcaagaaggagggattagtgctaggttgaggggcgtggagggaaaaaacgaagacgacacagacaaatgaatattttagtaaattgcctcaccactatttaatatcatgagtgttggctaagcaccacgttttttgtgccaccaccggttgtaatttttttcatgttgtgccctctctgtaaagcctgtttaggggaatagagaaaagctaaaggtgttcggcaaaacagtgacagggacgctgtctccatcaccaggggcaagtcatgctgtgtcaatattctaccaaagagtattatttttgaatcagtagagaaaaatcccttgtctcaggcagtggttggacactttgtcagctataaatcacatgttcgttaagttagcacagaatattccactttaaatacagggtaatgaagacaaacagaatcccaggggttcaacctggaggagaaacaatgctgattttatggagcatatgagaaatacacaatcgcagcaaacttctgaacgcttggactgttggccaagaacttgcctttggtggtgagcaagtgaaaactgaccagaactctgcctagtgtggaagaggagagtaccacatcaacaaaccaggcactggaatgggcaggtggttttctattccaaacagcaaactctaagaatagcgatcttataaataattgagagaaaatattttcttaatctttctgactcactggagaactgcattgtgacactttttcttaatctttctgactcactggagaactgcattgtgacactttttcaggtaggaaatgtattcagttggtaggaggaactggaataactgcaggttaaacaaatacaaggtttatttttttctactgaaaacagtagatataggcagatcaagacttttctgaagggcccactgtatgacccctgtctcagtctccttctgtctttatgctgctaccctgggcatatgccctcatacttggctcctaccagatggctgctgcaccctcagctcccacacgcacattctagcaagaagcagcagccaacaggtcaagagcaataaggcagatgcgaacatttcttgaagcctcactcattcaccaagctggctgaaacagatgctggaaaatgtagttgtcacttgtgcatgttgtcatttctgatgcaaatggggttctcttactaagaaaggaaatttgagtttgggtaggcaagtggagtgtctgccagagtcaccaggcagggagcaaagtctcatagacaaatccatggaattgggaatcactgagcctcatttctgctttgactctgcagatttagcaaattccccagctgcaaaaggaaaattctttttctaattccaggagaatggatttctcgaggaataatttaaaggtgtcagttaatttattaacattttcttcaaataaaatattcccataagatgcaaccgttcttttatgtatataagtttaaagaggataaaaagttgaaaaatctttcttaattgtttactgagggagtaagactttcaaccaactgtactgtaaattagaaataaaataattataacaactaaccactacagtaatttacactgttaacactgcattttcaaacttattgggccattgtatgctctaaacttctgcttttatctgccttttaagtgaggaaaatgttattgtcgttatctagagctcacagattgagatctactgcaaataaacatgaatgaaaagttgggttccctgcgtaggggaattgcagaattcgtgaaatcttcaggagacgagacactgcagtctgacataacacagcctgacccaaggggtcgcacagaagactgtgagctctgagccctgcatctcttcttttcatgacccaatgcgggcatcccaactacccagacaaaggaggcttatttgaaataattggcagtcacagccacgttttcagtgttatgtttcaaactgtttgtctctgatcctgtttgaactttgatgacaatatctgtgtctctaatgagaccgaactgctgtcagcatctgaaaacgctgcccagctcgtgtctgaggttggcacgttggacggatgctgcgctcgttcctcagggggaaccatgcggctccggctttgctctctcaggcagcttctgcagtgagtgcgcaggtcgtgagggctgcccggtgaatcctgggactgggccttgggagagttttcagaatccacctttggtgaggtgatgtgatgggaaggagcccactgctgtgcttttacagacccagtgtcaatcaaggattccttttttttctaaataattccatgaacattaaggaaagaagccacattcattcatttcaactttctgaacacctgctatgcctccatcactgtgcgaggatttgaggagacagggttagatggcattggtcactctctttagcttctctccatatgcacaatagtgattactggaccctcgggcaagtttcagggagtcagatgaaataacttcccaaatacaaagttaatgcaactatcaaaaagcaattagtatgcacctttgaatcaataaaaccacacagagtctattcccctgtaatcaaaacaatgtttatgtctcgtctttaaatagtgtacatgtcaggcacttgacaaatatattttaaaagtgaattttgttttttttgtaccttaacaaaaagttagccaggtgaaatcctttttcattcttaacagtgtatttcaaaatattcacgtttccgagaataccgaggacatgaagctcagaaaaacactaagcccatgaaacaaagaatccttagagcgaaaatacaaatcagcaaaagatggattttacaaatggaaacactaagagagcttaggtaactacaagtgctatgaggaatgcctgggccctccagaaagcccagcacagcttccctttacttacatataatgcctagcgaaggaataaaattcagggatgctgtaattagtggatgctaaaacccacactcacaagaaaaatacaagagcggaaatgctaaaattctcaagacatgcaggcagtggtttcctgctgaaagaggttttgcagttcttcctttccttgccttcactaatgaggaaatgtcctctatgacagcaagtctttctctctccacccaaaggctgttctgtagctgaccggcatattgcaggtcctgtgaaaggtggagatcgtttcatctgagtcactcttgcttggaaatacacctgttccctaatgtgcagcccctcggtattgtgctggctttctagatctgagtttacatttccctgtgcagaataccttgacaaatggcagctttctgtgactgatgacagtgcctggtttgtatgagatgtgacttccttctctcaggactgtcatccatctctaatgtcatactgctcatcaaagcaaaccatacagactttctttggaaaacactgaaattggcatgcatttacttttaaacatttattttctctttttaaaaactttacgtgtgtaaatttaggaggtaaaagtgttatattaaaaaatacaatggatttgaaaaatacatcaatttgtcatcatgctctagcctcattttcatgttctgaaggcacccttaatagaaactctgattttgtttgtatctggggagaaatccaggggaaagaagagaaattccatgaatcctcctacaggcaacttttatcagaggcgtgtaacatacagtgaatgcagttaatttgggcaactggtgcatgatttatagctttgaggatctaatctaatctgggtcattcctcttattagaggtgtgaccctgggcaaaccacacgcatagccttagcttccattttcctccatctgtacaagggggatactaacacctccttggcagagctgtgggaatttcacaagatgcacgtgccaacatctgtgcgcgtggaatgcactaaatatcagtaaatgaccagtgatgatgacaacgaagaatgatgatatttatcaataacaatcactttcaaggaaaatattttcattgtgttttgaattatttagactctccataccaaaaaaggccacaagaaattgcttatcttttatctaagtttttctaagccaccagagcctaaaatcaaaatgatttatagattaatttcaggaagagaaaaagagaaatgtggttggggagagggagaaagagggagggaggatcttttcttcctttctcctgagcttccatcttgtcccacagaggtgggtacctcaggcctttctcccatgcaatgctgggaagggaggaaccctctacacctcccattattttcaggaggacagcggctgctgtgactgatctcaccttcacattcattggtgaccactagaggtgggagtcgctgggatatttttagcataggctggatgacacctccatggcaggtacgtcagccacctctgctttagtcaccagcatagggctgtgcttagcagagagcctagcatagagaggatgcttattaaatattgggtaaaagaataaaatgataaataagggccactataaaatgaatgttacacaaaaacgtgttttccccaacaactcacccagatgaagacttacagagcagcccagctactcctccccatatagaattcctcatctggtatgttgcaatgacttttatttttaaactgttcttgaatcttttctgacacaccgtttgcatctcagaagtgtatataggtcttttaccttatgtggacttacggagatggagcaagagaaacctgttcttaatgatgcccgcttctatttttccttcccctgagtgctagctgccaatagatcctgccttactacttgaattcccactgattccaatacaaatccagcaggataagaaatgtcttaatattatagcacaagctacctatatttttgacagctttagttgtgtttccaactttgaaaattgataagcatgaaccaggaaagacagtttgaaattctaattcaaaatctagggaaatgcatatctatttttctttgctgctaagagctgatcaaaagggtagatcaatcatgtaacagcgattacaatctctgcttctacataaaaaatgaatactttagagaaagactggggtttgatgcaactctacgctcataatttaccctgcatactgtccaaaactataatttttaaattatatatttcctagaataatgtgtaagaaatggctttttaagccaaaatatgttaactattctattaaagaggactattgtatgcagacataaaaatataacatgaacatttatattattgtaaataattatgccaatataaactaaataatgtgatttcccccttattttaattaaataaaatataaacgtctaactttttgctttgctagcttatatcaaacattaattttaatattaaaatagtatgttaactttcatcagtaactgaagagcatcctgtaacccttttatcctgcaatttcacttactctttattctgaagtagtcttagacatgtgcacaaatttatctacaaggatgtccatcatattgttgttaataataatgaaaaaataaaattatctgaacaaataagagattgaactacggtttgctgaggcgctggaacatagtgttgtgccaaaaataatgctgttgaaaaatatttattaatatggaaaatgtggctaccttatttcaagtataaaatactcgctgtgatcccaatatttctgtgaaaaacaggcatgcataactcgaggagaaaagatcaaaaaagatataacccaatggttttatgaaggcggtgaaattacagagaatctgttcattggaatgcaagctttctgagggtaagagttcgggtcagtcttgttcagcacctggaacaggcctggttcaaaaataagggccccaaagatgcatgctgaatgacttaattttcttatttttcatacttatgatttccaaatttctgttgtaattgacaaaatgcatttttaaggtcctaatcaagctaagaagcagctttagggccaaggcgttttctaatgccatttcccacacacattccattctctactgatacttttagatagtttcataaggaagctaactgtaaataaactctgctgtatctttatgtatttcatcattgtgttcagttacttgctgacactaaccttccattagttgtccttggctggaattgtgtgagtgaccttgctcctaacataggaacgaggccatttattttatcccaaagttaaagcactattattggttttaccttaccctgattttttttttttttgcatgctacagtatattgtgtttggcacaatgcttcacatatgtgaatatttatattttaaaaatccggactctttttatttttattatggaatatctggctgaatgggatcagatttcctcatgaaagtataggggtgactcagagaaactgtgaggcagtcatttggaaattccctggaagttctaataccaggaagtatgtcctcaactacttgttttatagaacatccaaatctgagggtaaaactttcctggttaaaaataaggcaagaacaaataaataaaatagtaaggaataaatgcaagatatctattggatgacatagtaaatatagttaataacaatttgcaaattgcaaacagagtacattttaagtgttctcaccacaaaaaaataagcacatgaggtgatacatatgttcattagcttgaggtggccatcccacaatgtttatatatttcaaaacatcatgttagtataccataaatatatttggttttcatttatcaactaaaaaaattaattaaaaacaacaaaaaataaaaccaaaaacgtctcccggaggcagggatttagtccctgtggccaattcccatcgctctgtaactgagtgagtctgcataggaagtatgtttgttgaagcatatagttgtagagagtgacttttcattttacagtgcttagttttaaaaaattatgcacataatctatgactaaattttctctgttaaagtttcaggcaacgcagatgtgaagagaataaatatgaaagtctccctcctggccctggcttgcagccctctgctccctttagaggtaaaccctggaaagtgctttgcatatgtctttccaggactgatcaggtccatgcttacgtgcatatgtaactacacatgacacacatatacagtgttgcttggcttatcataaaaggcgttctagagtctgtattgtcttttgacttggtgttttttcaggtaataacatgacttccaagactttttccccctcattacactcaaatattattatttttaaaagtaccataatatggaattgttgtattttaattaatcaccttccccctgactcatagtcattgtattcctttcagtttctctcaataacaaactcttctctgtgttttgtacccttctccatacaacttttgacgcgagtgtaaagtacttctctattgcagaatactagaagaattgcaagctttaggatttaaatttttttgtttttttttgagatggagtcccactgtcacccaggctggagtgcagtggcacgatctcagccctttgcaacccccactgcccaagttcaagcgattttcctgcctcagcctcctgagtagctgggattacaggcatgtgccacctcacctggctaatttttgtatttttagtagagatggagtttaactatattggccaggctgatctcgagctcctgaccttaggtgatccacctgcctcagtctcccaaagtgctgggattacaggcgtgagccaccatacctggcctagttttaaatattttgaactttgatctttactgataaaatgcctcacccccaaaatgggatttactaatgtatacttccaccaagactggaaggaattagctgtccctagctgaataagtccctggtgcactttgttttatcactaagcacttttaatcctatgcttgaaagaaaagcattggtttaagatgcccgccaagtgtctttaagagaaaagttaccactggtgagcttttggatttacctccatgtctgaatgagccctctttttctgcccatgtgtcttatgtaccataattcaaattatggcagaacttggaagtagaaagtagaggtctatctaactactattggcttatttaaatgcacataataattcagttaaaataaaaatcccaggttaagtgctaagccacgtaggatgctggaatgagaggtatacattagcatgattgtgaagtatatgataaaactattcatggccccacaaaccaaactttaagaatcagaaaatgtgttgataaggttaaaataacaagatattctcttagttaattgcttttagtcatggttgtagcttaagcctttttctgattttgaaatgcagtttctcttggatgatgaggccataagtcagagatctgcttcaataaaagaataaaattatccataataacctctggatcatgaaggatagaaacataattacatttcctttaaaaatagcttgctggaggcacaaataaacagcagccataataatgtcgtatattaatataaccatccagaaaagaaccagaaagacaaaacctattattataatttaccatctattaaacatattagctataaaattaaaggctgatcttaaaaaacattaaaggttgttttttttaaaagagccaaagtaagcaaaaaaaagagatttgtttaataaggttgcttttctcaagaaattaatgcagttatgtaacaattcaaatgcatttgcaaactataccaaacttcaatgttctctaactattcagagtacacaagcaatcagcatcacatatatttgatttaatcattgaaaatacagctatttattttaaatcataaaatgaaaaaagttggataatcatatactgaaaagatagaattctgtgataattgctcattaaaaatagaaattaggccaggcatggtggctcacacctataatcccatcacttggggaggccaagacaggtagatcacctgaggtcaggagtttgagaccagcctggccaacatggtgacaccccgtctgtactaaaaaaaatacaaaaaattaaccagcgtggtggtggacatctgtaatcccagctacttgggtggctgaggcaggataattgcttgaacccaggaggtggaaattgcagagagccgagatagcatcactgcactccagcctgggtgacagagtgagactctgtcaaaaaacaaaaaaaaaaaagaaagaaagaagaaagaaaagaaagaaagaaagaaaaataaagcaactctttacccaaaaaaacaaaaataaacagtatcctaaaaggcataacattacaatatttccagttaaaatcaggaactaggcagaaacatgttccacggctgttaaaagccttgaggattttagtacatatgattaaggtaaaatctaatttcataagcattgaaaaagaaaagagccaattatctcctattgctgtgatactattttgtacctggcaaaacaagtgattctagctaaagagaaactgagagaattaaaaaaagaatttgcaggtataccagataagtgtttttgaataggttttctctattttggcaattaagtaagagtggaaacgtgaaaaagtaagcattaacatgatctgaaaagcaatacattttgtacaatatccatatatgaggatcactataaaatcttatttaaagacctaaaagcaaagcaagtgtgtgattcaagcccacctctccgcacttcacctcgtccctccgccttatttccccatcttggtaaatgacacctccatctaccaatttattgagtcagaagcccaggagccgtacctggcgcctcgctttccccatccccatatccaagccctcagcatgtcctgtggactttgccgctaaggacctgctgaatagaacgatcgcccatcacctccaatgccaagcctccactcaagcggatctggtctctgtcctggaccccgggattccttcctgactgggacccgctgacactcttgctcttctgcattgcgctttccacccagcacccagggaactccacacctcacatctgattctatcactccccagtggagagcccgattgctgctgcctgcagttacagcacaattccagtgcctcgcctcagcctacacgacctgggctctgctccctcccagcagcgtccccgtccaccctccccactttccgtgtgtggcagtaggcccatcttcctgtcccttggttagaccaagctcacgtggctgccagagcttcccatcaacgcagcagctagttcagcaccaactctccagtcgctttctatccgttactcggctttgtttttgtttgtttgtttgtttgtttttaattattatactttaagttctagggtacatgtgcacaacgtgcaggtttgttacatatgtatacatgtgccatgttggtgtgctgcacccattaactcgccatttacattaggtatatctcctaatgctatccctcccccccccccaccccacgacaggccccggtgtgtgatgttccccttcctgtgtccatgtgttctcattgttcaattcccacctatgagtgagaacatgcggtgtttggttttctgtccttgcaatagtttgctgagaatgatggtttccagcttcatccatgtccctacaaaggacatgaactcatcattttttatggctgcatagtattccatggtgtatatgtgccacattttcttaatccagtctatcattgatggacattcgggttggttccaagtctttgctattgtgaatagtgctgcaataaacatacgtgtgcatgtgtctttatagcagcatgatttatagtcctttgagtatatacccagtaatgggatagctgggtcaaatggtatttctagttctagatccctgaggaatcgccacaatgacttccacaatggttgaaccagtttacagtcccaccaacagtgtaaaagtgttcctatttctccacatcctctccagcacctgttgtttcctgactttttaatgatcgccattctaacaggtgtgagatggtatctcattgcggttttgatttgcatttctctgatggctttgtttttctcatgaggatgcacaactctctgagcttctatctgttcacaggtgaaacaccctcatgcacactggagcatcagcacggtgagggcagggcgtccacgtgtctttgtgccctgcttgaccccgtgctgggaccttctacgagagccacggtgacacgtacagcagatttccgggacacggcagttgtgaaaataaaagaacgaaagaatgaacaaaaggaaagtgaacacttccccattttatagattggagagttgaggtttggcgagtgatgtgaattatccatgattacgtagctgaggtttggccaagtgcagactccagatggttctgtctagttctgcctcccagggctttcccctgtgcaggctgcctcgaccctgcctgactgccgcctgtgtctgaatctctcagagccgtctgtcttaaacaggaagagacggcctttatatactgttttcaaggcaacccactcccatttaatgttagtctagatggttgcaggtgtattttgttatgctggcttctggtttactctgcatagtcggggagcatgagaggggtgatatggttagcaaatgcctttgaattgttacataactacattgattccttgaaaaaagccatcttattaaaacaaaacaaggaatattatgccttgttgaagctgacctatcaaaatgtaaaagaaataaagtaatgaatggtgtcttggaaaaaacagtgttttgttattgtgtcagttatacctaaagacaaagaatgtcttgaaagcatatttttaaatcaagaaatgttaaacactgaaaactattacaaaatcttctacaaaagtagcaatatagtattcatcaataactaggatacttttaagtttctccttgatattttctcacccctttccatcaacaaacattgtgcttaggaccagtggcctttcctctcctgccaggctttcaaagtacggaaaagcaaacagaacagaacactcgaatttcagctcataggctggaagcaaatagactgtggtcagacaagggctgacaggttcggagtgattttcctcatttgtgatagcaactaagagatctgggaagtattgtctgtggtaggcataagcaggatgaaaatggcatggtagctatgtagacacagcactgaggtggaggagaaggatgaagaacagaagaggggatggggagaaaaaagtgaagaaaaagagaaaggaaggaaggatgatacaggaagggaaaggaagaaaagaggaaggaagttgctgagcaaaagcttggatttaaaaactagtaaaattttattagcatcatgcaaggacttagtaatgtaatatcattgaaacaaggtcaaacatggttaaataataaaactaggggagattgtagagttaaggaaattgagaaattaaataatagccctttacagaacaatacattagagacagcaatcaacatatgagagtgaaagcatgggaaaggagattaaagaaatggaagctagacaacaatgatccaaataaataatatttctcaaagaagaaactattatagcaccaaaccttctttttataagaattttgtaccaaggataattctctgaaataacagaaagtgctccaggaaaagtgggtacagaataattgacaccaaaatactttctttcaaaattacttgacatcaagcatgaagaaagaattttcagacattcagacaagaaaaaagaaaggcatctacaagtggtgaaaaatttaggctaaccataaatctctagagaattcagggactatagcacgaattatttttgagaaaaaatgccaacaacttctgacgatgaaatccggtgaaatatgttattcatccaagcaaaaatgccaggaatggagaagcagtggtgagagaatgggtgtgaggattgattctttctttaatttgaaactaaaactaaattattgtgggaatttctgttacagaatttaaggtgttataatcctggcaaaataaacataacaatgtaaccaaagcattaggaggtaggggaagaaaaaagaagaagtataaaattgttaatgttgtttatctttcatatgattgagtttatcaataatatctaaatttgaaacagaggtacaaaaacttaatgagtataattccttaattattttcaaaatctttgtttcattattttaatatgatctcttagacactaatatttcatttgataaagtaacatttatctgtttttctttatttggtttctttaatagcacttttcccttgcattaatgcaaaattatatttggtatcttttgaaaattaaactgatgaaaaagaaacaacagtcatattgattgggaaagaaggaaaaggtgttctattcaaagataatatgattgtctgcatagaaaatctcaaagaatctaccaaaaactactggaactaatgagtgggtctagaaggttgcaatatacaaggtcaatatacaaaagtccattgtatttctatacaccagcaatgaataataggaactttatttgaaaaagtattatgtaaaacaacattgaaaacaaaattcttagtaaaatctaacaaaatatgtaaagatttttatgcagaatactataaaacactgataaaagaaattaaataagatctgtatgagtagaaagatgtactatgttcatggatcagaagactcaatattgttaagatgccaattcttcctaaactgacctgtagactcaatgtaattccagtgaaaattccagcagcattctttttgtaaatatcggcaagttgattctaaaatttatatgaaaaagtagaagactagaattgtccaaacaaattcttaaaagactaacaacatggagaacccacactacataattttgagacttaccataggactgtgataataaaatactgtggtatagctgaaaggatatgaacacaggccaaaagaacaggatagagagtccaaaaaaggcccacacatctatgccaattgattattgacaaagacaagaaaggatagttttttcaacacataattctggagcttgtggttatctataaatcaaaacacaaacatctcagcttatacacaaatgaactcaagtggatcatagaaatacatgtacatcttaaaaatataaaacttaaagaagaaaatacagaaaaaaatttcacgaccttagattagaaaaatatttattagaagcagtatctaaagcacaatccataaaagaaaaaaattgataaactgaacttttccaaaattaaaaacttctctactgtggaagatactgctaagagaatagaaaggcaagccacagacagggaaaaatttttgcaaaatacttatcaggagaagaacttatatttaaaccataaaaagaacttttaaatgcattaataaaaactcaattcaatttttaaaatggtatagagatttgaatagattttttcacaaaagaatatatattattgacaaacaaagcacagaaaaaagatgcttaagtcattaggaaaatatgaattaaaaccacaatgaggtaccactacattattttaaaacctgacagtatcaatgccggtggggatgaggtgaaactagaattctcataacactgcttgtgggaatgcaaaatggtgcagccactttgggaaacaatttgccagttccttatggtgttaaacacaatcccactgctcgatttttatccaagagaaatgaaaacctacatccacacaaagtcctgtgtacaaatgttcaaagcagctttatttataatagctgaaactagaaacaactcaaatgtcctttgactggtgaatacacaaacaaaatgtggtacatttgtataatgaaatagtattcatcaacaacaacaaaaaattaacaaattaaattatccgggtgtggtggcatgtgcctgtagtcccagctactcaggctgaagtgggaggtcacttgagcccagaagttcaaggctgcagtgagctatgatcatgccactgtatgccagcctggatgacagagcaagaccgtatatctaaaaataatttttttaactaacaaatgatcattacacacaatatcgtggaggactctcaaaagcattttgctaagcgaaagatatcagtcacgtaagtccacatactgtatgatgttatccataagactttctggaaaaagcaaaaccccagagacagaagtccgatcagttttcatcaggaggtgggggaggaagaaggttcaaggtaccttccaaagggaacttcacggggtggaggtaatattctgtatctggattgtggtgaagtttacatgactgtatttgtcaaaactcatagagctatatatctaaaatggttgaattttattgtacataaattatacctcaataaacctgactataaaattaaattggcatgtttatagatcctatatatgggaattgttcccatttatcatttctatctggatattcttatagacataaatattaatctttaaatctttgttaatacaaatgttaacatgtatcagttaacattcctgatgtttatagtagggtgattgggactttgagtgacattttgaattcttcttcatgcatttctgtatttcttgatttttaaaataagcatgtgctgttttttaaaataaaaaagttttatttttgctaagggctcaaaataaaggctccaaaaaataaaggattagtaagatctgaacaaaagaaatccggaatggcaatgagggcccagcagagctgagtagaggtgagaatatgatttccatcaacttggcctttctgggtttcaggactggatctgagcaggcagttgaccactgacctatcatctagactatggtttcctcagtaaaggaccactttcctacaatgatctctcaactgcctttagttcttgactcctaagaggtttccaacacacagacttatatggagtcggtgtattcccggaatgctcagacagtagggagtttctttagatagttctcgtattgtattggcatactcctctttcagttcttgggagaatttactacatactttatgcaatgattttagtaatcaagttacagtcatactgctgatttccctacagaaagtcaggcagccgaagtggtggcacggcataaattgatacatgaaatccaccatctgttctcaatgtacgcagcggctcctccacacctgcctggacttatcttgagaaggagagcaacaagaagaaaaaaaaatcaaaatgtttaattaatgttgctgggaaagaaggtgcaatccagcaaaactgaagttacagatactcataagctcacaggcctcttcttcaaagctgttaaggcgtaagctagaagtaagtggtctttgtagccctctgatggctcgttggggatgggaaagttagcaaatcctcttatgtgaactgcagagcccaagggcgaggaaaagcccgctcttgtgctttcacatttctgcccttgaaatacgacatagcacccccgggcacctgctgtcttttcattttctcacactgctgaataaataagcattttagggaaagccaagaacataatgaaggcttaactcagagtgcagaagtgtctagggatgcccactacagctcagaggccaaatgtcaccaagatcacttccatacacatagactccattcactttttgaggtcacctgcattgccaatgacagctcaaaagcgtaacatttcacagtttctttctcatgatctccttaggcctactaactacacatataaactcaaatgataaaaggatgaactagctatttttataatctctcattttactcttcaaagtgtttaggcaagaataaaatatataacaatgcataaatgaacctgaacacttggctctttaagattcctctagaatatccttggcatctctgtagagaaaaaaggtagcatgaaaagaagccaaatcgtgcttcacacacgcccactccacttcccatgacactctgggcacatctttttagaaaatacgaattcggtcttattcatttaagcttccataaagtaagtaatgcatgatttttaaactttctgttttgatgcgtaggtgccaacaggcaactttctcaggttgtcaccctatttaaaagttccgagaaaatccacagcattagacatgtctcttgtaagttactgcgccccttagtaaaccacatgacaagctggtaaatacaagtattcacaagcaaatacgatgtgttacaggtgaacatagcaagcccctgggcgattggggaaaacgatggactgactgagaaagcatttaggcatagtgacttgttcccggactgtccagagaggtttaaattccttgctagaaactcttatgaaaggaaatgtgaggtgggcggcagaaaggctaaggtgttctaggctgcaataagaaaagtatacaatccacccagtgcggtggctcacgcctgtaatcccagcacttcaggaggccgaggtgggcagattacaaggtcaggagattgaggccagcctggctaacacagtgaaaccccatctctactaaaaatacaaaaaattagccgggcatggtggcggttgcctttagtcccagttactcaggaggctgaggcaggaaaattgcttgaacctgggaggcggaggttgcagtgagccaagatcataccactgcactccagcctgggcaacagagcaagactctgtctcaaaaaaaaaaaaaaaaaaagaaaagaaaaaaaaaagaaaagaaaacaacgtggcctgtggcctggtctggttctgctctgctatccacggctcaggtcaatctggaacatgggattccgtgtgggaaagtacatgctaaaaggaaattagaagatctgtaccaagaaaagaatagcagcaccatgagagaaccgggacttgggagacgtaaaggatgacagaagaggtctgatcatttagcctggaacagactcagtgcaagaaaggacaatatcacccttttcaaatatttgaaaagctgggctttgaagcgatttgtttggtttgccccaaagggtataacttagaccaaatggtcagaaactacagagaaacagatttcagctcagtaaagggaaggaccttccagcgggcagcgatagaatggccaaagaggaaggaccttccagccagtttgaagacagaataggctgccttgagaggtgaggctggctttgcagcacacttgagttgcacaaacagcctgggcagctgtctgcggggaagccggaaaaggcatttagtaggtagaagtaaaagagggtccacgagcccatataataaacttggctgttgagtgagaatctggcacccacctacataggcgctcacagttcaattgatgatggaaataatatcacatttctttctgttagtagaaccctacatgggccgggtagaagagaaggtgctctgtgtatggaggaagtctttgagcaagcgaaattacagtgtttgaagaaacacacttccctcttttatacagttccgaaactgttataaagatttggttgtttgaagggttgaaaaactactgcttcgttaagaaccacgctgtggcttcaggaaaaggaaaaatcaaaacttgcgggcatcgcagaccgtggcatttattattcaatggtttgacactggaaatgcatataccatgcagcctgcagatttatagactgcagattttgtggtatgttaaaaatatttttttgcaagtgatttgaagtatgctatttatgatatttcagcaaaatgagctactgtaacctaagttaaacaagttattcaatagtttcaagcagcaaactataacctagcaagactttggaagctgaggggtggtagcaccctcctactataggaaactattcttcaattatttgtaattattattattagaatcatttcatatcttctggagagttattaagaagatggggttgctgatcttcttaataacaaattatccaatttattatctgtaattttgttcctcaaaactttcccccttaagttgttgttggatagaaaaggttgcttttttgtttgactttttactaaattatcatggattctcacatagtatatatatatgtgtgtgtgtgtgtgtgtgtgtgtgtgtgtgtacattgaactcatatcttttcattataattattggaagcataaactgtatgaaacctgacattctatattattattattattattattttgctttctggcattcaatatattgcctgtcccaatttatttattctgagttttcattgcatttatcatactctgtaaaatgctcgtgctagtaatggctcccaaagatacatctatatacaaatccccagaatctgtgaatgttaccttatttgaaaacatggtctttggagaatgtgattatcctggattatctggatgggctctaaatgcaatcacatgtgtccctagaaacgaggggtggtggggggttggagagagacacacagaggagaaggcaatgtggagatggaggcagagacttgagtgatggggccacaagccaaggcatgctggtagccaccaaaatttggaagaagcaaagattaaatttcccctagggcctccagagggagtgtaaccccacctccatcttggttttgaatttctggactccagaaatgtgtgagaataatttcttttactttttcatccagttcatggtaacttgttacagcaaccatatgaaacaaatagtgttctttcttctagagtttgttttcctaccttctcccaactctaaattgctcacacaatgtttgggaatttccttccccatctctaggttctaaaatcctgccagtgcttccaggcttagcttcacatggtgtggccccagcagcctgctgtgtccaccccaacccgcatgactgggagtcactcaactcctcctctgaacactcaacacagggaaagccccggagtcctcattgtctcatctgaaaaccctctcatgattgtttgcaaactgcatgagataaactgaaaatatttagcattgtattcagggcagagtaggtgttcggcccacctgtcgccttccaaattgccagtgcatagctgtatctctttcccagcacacactccagcaggcgactgctgtcattatgccttgtgaggcgatcggggctgagtgagcttcctaagcttccctctttttcacctaacacctttgctttctatcatcccttttctgttttacttttatcttagaggaagagggttttttcttccattccaaggttaaactttccaactaggttttaatgttcatcattggcgcctcctctggagcctctagccattttctccttctggaaaacatctcaatcaatccctctctgtttgcactttcttctaaactgaaaaacagaatgaggtgcaacaatgttaaaatagagaaagaaaatgcaattgctccctttctctcccaccctacttgattttttccacagtcatttttttttttaagactgcttccgatgcctcaccattcacgcattctaaatcatttctaacctggtctccgtgttcacctctgctattttttttcaaattcattagtgatttcatagttatgaagtccagttactgcttctgggacatgatgctgttgcacctaactctgctgtggcctgcatattggatatctctgcttcgattcaaaatgtttaaaatcggtatcattccccgatctccaatttatcttttcatgttcctctcagtctctcacttgggtaccaagtgttcatctttgctttttccccttctttccacccaatctgtgcttctgtcctcctcctccgcctgacagttttacgccctgaacatctatataatttattgttactgttactccattggatataatgaggctctcatcactcacttgccacctgagctattgcagtttcctcctgacactcattccacctcctgccttccttcattccactcactcccccacaattctgccagaataattttttttcttttttttctttgagacacagtttcactctgtcccccaggctggagtgcaatggtgcgatctcaactcactgcaacctctgcctcccaagttcaagcaattttcctgcctcagcctcccaagtagctgggattacaggcatgtgccaccatgcccagctaatttttgtatttttagtagagatagggttttgccatgttggccaggctggtcttgaactcctgacctcaagtgatccacccacctcagcctcccaaagttctgggattacaggtgtgagccaccgcacctggaccagattaatttttaagtgtatttattaatatatcacttttttgtataaaatccttttgtggctacccattttctattgaatcaagtatattccattcaatttacttcagttgtcattgcaaagctctttacagtacagaagtcaccgtggctaacatctatggaattctggtatgttctggggactctgaagcacttacagatgttatctcctcttatcctgacaagaagactgtgtggcaggctcagtactgtttgagtgtcacagtgagaatccagaggtttagccaggattagaactgtgtgtctctatctctacagcctaatgagagagcccacaagagaatctttaaggccgcctccactcacacccgcttccggactcccccacagtctcaccctgacggcttcatgacgtgatcacgctccactcagtggtctcacctctgcctgctgaggccagatgctttctggtgccctgctcagaccccttctaacagcacagtgtgtgtttctcttgctccttcacagctgtatgcactcaggagcatggggacaccctcctttcatcttggtgtcctcttcaacatcctagcacatgggcctgaacgtaggagtggctccatatgtgtggaattccaatgcctaggttttctgccttgctagaaaacaggctttttaagggtaggacaaaactataagaaacatttgtatgttttatagtattgaacatgttgcattatacagagctgatagtaaatattgaatgaatgaatgaacgaatgaatgaaataaaagaaagggaatcacttaagctgtgtgggtttcttcagctataaaataaaggcgtcaggacagactgcctctgagattcctttcagatctaaaatgttatgagtttcagattctgcttattctttgttttttaattctgcttattctttgttttttaattctgcttattctaatacttttttattttgtgtcagtaaacaaaaaagtaagtggactttagcatctgtgaaattaaacccaagaagccatcataatgaaatcacctttgcaaaaatagtaacagtgagaaaattattgcagtgaaagagaacgtatctaaacaatccccactttgcctttaacctccaaaccgcctttagtcattcctgggcatgacagcctttcccaaacctacacggcctttgcaaaactaatacaagaacacaggttaggagaatgagggacctgaattatgttaaggaacagacgtacacaattatcagccattatcctagaggaaacaagatttcaacgtgctcaattatttctgcagatagcaacactattgtgtactagaacctaagactggccttttgaaatgtcttttcaggtttttgcacttctgaccaccaatggctccactcggacccaccaaccagctatgaggcctcactcacaaggagaccccctggcctgtcaaactatccttgaaaaaccctagtctccaaattttggcagagattgatttgagcaataactctatctcctacgtgctgtggccagtcttgtgccaattaaactattgcaatgccatagtctcagtgaattggttttgtctgtgtagtgggcaagaagagcccatcaggtggttacaataacttttttgtttttttgagacagagtcttgctctgtctccaggttgggagtgcagtggcgcgatcttggctcactgcaacatccacctcccgggttcaagggattcccctgcctcagcctcgtgaacagctagtgttataggcacacaccaccacacccagctaattttttgtattttagtagagaaggggtttcaccatcttggccaggatggtctcgatctcctgacctcgtgatccgcctgcctcggtctcccaaagtatttttccattttatataaaatgttagattgggtgctaagttaatttcttctcctcctgcttatactagaaatctttgagcatcaaagtaaactcaagaatttcaattgctttaagaaactaacctgagtgtacagaagaataaagaggttaaagaaaatatccagctatgaaggaacttgggagttgttaatgttctagaattgcatcatgtatctttaaggggcaaaggagagacataatttaaaacatccactagagagctctgcaacatttcctttttgcaaacattaatccatgttaattattccccagagcaatgtcagcattcccatagattcgattctactgataaggactttgattatgcacccatgttcacagcaaccttattcacaatagccaaaaggtggaaacaactcaagggtccatggacaagtgaatgggtaaacaaaacgtggtgcatacatatcgcagaatattatttaaccttaagaaggaaggaaatcctggcacatgtcgcaacatggatgaattttgtggacagtgtgcatggtgaagtaagccagacacagaaggaaaaatcctgtatgattccaatcataatgaagtacctggagaagtcaaactcgcagagacagaaagtagaatggtggttgccagaggctagggtgaggtggccagttattgtttaatgggtacacagtattagttttggaagatgaaaaaattttgcagatggatggcagagacggtagcccaagaatgtgaatacacttaaggccttatggctgtacacttaaaaatggctaaaatggtcaattttatgttatttagaaaatgagaatggggagaaaccttgagcaagtgaacaagaaaattatagccttgaaaaaaacaagaatagggaactacataatatattcttctgtgatttgaacactccgattactattgagagctagtgaaattactggtcttgaattttctaaggatgctagctgtggaggagaaggaagaaagagataatcaggcacagagtaggggaaggcactggggttgctatgctgtggaatgaggaggaagaaagaagagacagaaaggccttatcatactaggaaatggattgtcttctgctgccctgtattccagagtgatgtgtggtgagagggcttgacatgggatcataacatctgcgagtgtgagcctggggtaggcgggatgcatgggctgcaatacaccagacagcaccactgccgcgctggagcaaaggctctgggagctgcttcctgggctggagcccacccactagcagggctggagcttgtcaaacttcattattctccaagatactgggagacccgggcccttcagcacctcactcatggatgttaaatctggaatagatagcgtagaggtgaagggaattttcttccctccagcttctgaaggtttgataatttgagtccataaaacaaactgacaatagacaggttaacagccagaagggcatgtgaatttattaacatgcccatggacatgggagtcccacaaacatgagactcaaaaaagggtcagctgactgaagtttttagactatcttccattccaggcgatggaaggaacaggggctaggggttccccgggggaggaggcaacaaggttatgggagagtgaaggcaggtaagcctggtgagcaaacggtgtcttgttatgtggataaaactctcctataaccctggagctgccctcaggaagagcagatgggaatggggtaaaagtctctatcagaccttcagcagcgtcagactttagcctttttttcccatgagttaacctttcctagatccggatgaggaagacaagggtgcctcggagcctgtctgcatggtctgtctacctcccgaatgcagattttccctacagatgcaaatctgcctcacaaaggacagcttttcagagctattcctgtgttctccagcccctctgaataccgatctcgaaatatgccaaagaagcatattttagggtaaaatattccggtttctttcaatagaaccacagaaatatgcatgttttaaaagagcaaagacattatgggaacatattgaaggaaaaatatgaaaaagacaagagcaaaaggatcaaacacagaagaaaatgttggcaggtgttggggaaaagtgggcgtgagactcaccaggtgcttcatggcccccagggaacttgcagaacatcaaaattagattttgactgattttccaacaaattggttggcttcagaagtaaaaaaaaaaataaacagagatagtcatttttattagtagtaatcatcaaaaataaaaatcgatttgaaaatttctgtgtaggttttcagttttacagacataatctccagttccttttaagaatggtctgaacccagagcccctctgtccataccaattacatcacatgttacactgaagacttgaccagccgtgtcacaagcacccagatgtcttacctcgcaaggcaccagtgcctccctgtaattgctgcactgtcagaatcaatatctctctggggtctgcttttgaggttcagccaatcagctccattgcgctgacacagctcagcttatgccaaagagagctgccacctcagtccccacaaaagaacaaaacacaccatcatcccagatgatgcaacccactccctcagcaaacatcactgtgacttgaaaatcacagactctcagagaatgaaggaggcctggagaccagctcctcggagcctagcactttcctgaagcacagacaggaggggcatgatcacacggggagccagtgactgagccggggatgcctcctgacaccccggctgggcccatgtccatgctgccatgtatggccaggcatcagtgttttaatgaccccttcatctgatcacatggctttgcacacttactttaattttagacttgaaaacatgtgatttactagttgtgtgcttctaagaatccatgacacagacaagaaagaagaatgaattaggacgataggcccaccgggggccaaaattctcattctcagcctacctctcttatgagtgacagggcaagccctgatgccactgaagcaacagcagtgaactaagtcagggccaaggtacagaggacttgttttggtgtcacagcacctcctgaactccttgtctgtatgtttgcgtaattccctaccatccaaacttctactctattgatccatcccaacacagaatccaagaagaccaggtaagtcttcccttgtcctcataaccgaagctcgacttaggttcagatctccagtgggaatgaataagccaaggaggtgagggcagtggaggaaagtggcagcggcgtgagcatccgttctgctgcagcagatgcagcggtcatggcgcccgggcgacacctggtgctgcatggcagtggcatcacccccgccaggatcccgggtgcaccgggcccagtgcccggctgccttcttgctcagagtcaggtctcagtgtctgtggtcctagacagtactttctgctgattggcccggacaggtcagctgagaatgaaggactagggttcttctctgagaactttgcctcaacaataagaaacttgaagaacagtgactttgtcacactgtaacattaacaatttctttttcagagaagtaaaatgtgggcaaattatagttttcctgaaagaatttaattttcaaataattctggccaatcccttcattgttttcttttgaaaatattattatcggaaaagtttggtcccaaattctcagcacagaatttcatttggattaaaattagccagagagaatgatcagtaaggaccaggaaaagggagtgtatgagagtgatggagtttgaaatctcattgagtagaaatcccattgaccacaattatccagctctgaacaaggatcaaatgctcataggccaaaaaaagctccggattaggccaaagaatctcacttaaccaacttgtatataacaaatactccagtggattccacagcaatttcattttggaatttgtcatgggaaataggtaggaaagacagactgaaatggattcatgcataaagaaatgcacttaaagaaaaggggtaatttttggcattgacgggttctgaattagatacaaatcctcagagaaaggatttagacatgttggccaggcgagatggctgacgcctgtaatgccagcactttgggaggccgaggcaggtggatcacctgagatcaggagttcaagaccagcctgaccaacatggtgaaaccccgtctctactaaaaatgcaaaaattagctgggtttgttggtgcacgcctgtaatcccagctacacgggaggctgaggcaggagaatcccctgaatccgggaggcagaggttgcagtgagccaagatcgcgccactgcactccaacctgggtgacaagagcaaagctctgtctcaaaataaataaataaacaaacagctagtaactgggttttgacatatggaaattccttacttcttatttcaattcactgctcttttctaaacacagaactactgtgtagtgtaacaggatgattggcagggggtgctctgtggcccctggtgtgtgcccctaacaaagagccatgtcctctgcagagagttcttggtggaggaggctccactgggaaaagccaagccactgggtggtgcgttgccctcaagtttcccagtgatgccagtgatacctgccctaaattacaaatgctgcttacacatggccaaaaaaaaaaaaaaaagcacatgtcagtgattggttgtattacaaagcacgtcagtgattggttgtattactgagctactggaaaagctgcagcatctgcagcaattgcggaggctcaggaaacagtaccccagatgacagcctcagaagcaagagcttctctctgctcacttctgccttccggttcctcagcccaattctcccctgaggccagatatagaaaccagaatccctcttcctccaggaccgtcacagtaaccacaacccctttgccccagagccagccttaaaacctaaaagtattactctaactttcgctccgcctttctgggtaagaactggcgataaagacactctctgacccaccttgtttgagtgtaggtatgagatccgattccagagagggccccaccccacaccagaaggaaggaaagctgaccagagaggccagcaagaatctggacagacaggccttgctgggtgtccccactcagtctattcgcattagaccacaccctttcgtccaatcctatgcctacacagctgcccatactttgttaaacctaagcataaaaatggacagtttcccctgtatctttgggtcttcaatctgaaggctcctatgtacacattaagaaaatttgtacatcttttctcaaatgaatctgccttttgtgagttgatttttcagcgaaccttcagagggtgaagggaaaatttctcctaggccctgacacaaccataactactgcagtctgaaacaggtatgctccacagcctacaacaggtatagaaagtcacggaacacagatggctaaggttcaaaccagcacgagagggcgttcaaaaagctaaggagttaggctgggtgcagtggctcacgcctgtaatcccagcactttgggaggccgaggcaggcagattacctgaggtcaggagttcaagaccagcctggccaacatggtgaaaccctgtctccactcaaaaaaaaaaatttagcaggatgtggtggcaggtgcctgtaatcccagctactagggaggctgagacacaagaatcatttgaacccaggaagcaaaggttgcagtgagccaagatcatgccactgcactctagcctgggcaacagagcaagaccccgtctcaaacaaacaaaaaagctcaggagttggatagctccacagcaggggctaacattccatctaagcaaagtgactataatccaaccactttttgacgtctaaataaacttgtgcctttaatgactgttttctgattgacatcccattactgcctgaaggcaaaacaagctgaaagggcaagattgtgtgatagccaaagaaactcattcacatattaagccattgacaattttaagacatattctaaatggatcattctagcaattaagtggaggggaaatgaacggtaggggacataagcagggaaactagaaagaaagtttgacagttgatgtcaaaaataagaaaggctcaaactagcaccatgtctgtaaggaagaaaagaaagggaaaatttcccaaacatatatttagaagttaaatcaatcacactctattcactggacgatgaaagactgggtgaggaaaataaaaacatcaagaatcattgctcgtgtttttggaggcagtgttgcttggggttagtcagtaacgggtggcaaaataagaacaaaataatgactaccaaaacgcaaatgaaactaactagcggctacgttgatttgcatctcagccttattgcttgtctttacctctgggaaaaaaattgaagaagtaatagaaataaaatgcagagtggtatggagagggcgtcagtttagcaggaggtaatacccaaatctttagaaaaagcagagaatgttatttggataccgtgagcttcactgtagaggccaaggcatggtgagatttaataaaggtgcacagagcataaatctaaaaggcgattatgctagtataacccacacgatattgtggatgacgtgtttaatggcaacatcctgatccactcttgcctaggggatgttaatggaactacacaaaacctatcatgctttggttcaatgagagatttttttttttaagctcatacttcaagcaaggaacctaaaatctcttccatgatcacagtgtgcagaggcaatactaattttcagagcagcctgatctggaacaaaggagacaggaatcagggcagcctctgacagagtgctcacaggagaaagagatggtgctgcccggtacagcccctcccagcattcacaggcaatggctggaggtaagaagcaccaggtccggtctagataacagcatttgggacacacagcggataatccaagctgggacaggcagaggctactccttagtcagatggttaaggtctcgaagaattggtgactgtcatcaggacccgttctctgtgtttaagtgtgcacagggatttggacatattttttattttagagtgtagattctgtcgttctcgaaaatctttttcattttgtgaagtagcgagtttatttttattttttttaagagacagggtctcactctttcacccagggtggaatgcggtggcgtgatcatggatccctgcagcctcctgggtttaagcgatcctcccccctcagcctccccagaggctgggaccctgacaggcatactcagcactgagtttaaacccacctaacaaccaactacgcaacatgcccaggcactcccagagccaagattgtctagttgagtcaagggcttgatatccagagttggaaaaataaagagctctccttaacaaattgtatctgaataagtagacttgtgtttgggggagccaagtgttacagtagagcccaacgagtattataccttcaggcttcgcacgttctttacagtcataagcactcagcaaatggttaccatactggacgccatggaagacttattagaagggggtaaagttggaaatatgaaaatgagttaggctgtggccacagcctggaggaaaacaggtaagggttgatctaagatagaggcaacggcactagaaaggaggagacagctgcacatggtggcacacatctgtagtctcaactactaaggaggctgaggaaggaagatctctgagcccaggagtttcagattgtcgtgtgctatgatcacacctgtgaatagccactgcactccagctcaggcaatatagtaagaacccatctctaaaaataaaaagaagaaggggaagaaaggagaagatagctaaaagaaatttagaggcagacaatcgttcataagtaaaaaggcagtgaagtacataggacaaataagttactatacttgagagtaaaatattaaattggctagatcctaacttgtgagaaataatagagctacccgttccatactgacacccagcagtgaaccacacagcctttaggttaacaacgggactttctccagtcaagtacaagtcccagttctcttatcaaagagaactcaacttggatttatatgaagatcaaagaagccagctctgtaagtcatacctaaaaacattccatgcataaaataatgaagactactaggttatagagatggttatttgcaaagtgatagaatcccatttctcattaattgtgaaataatttaggacaaaaccaagaacagatgaaaacaggttatatagagagagaaaaaaaattcaaaaaatatagcaaaggcagtgataccaagacaaatgtgaattacatacccaatatttttctatttgcaaaatgtgtgattagatgagttggaagaaactgcctacaatttactgaaatactttgtgtatttgtacgtatgagtgggagagagagagggagggagagggagacagggaaacagagagagagagagacagagagaattatatttcagaccaagaatctgattcagtcactaaaactacagactgcttttaatctacagcccaaggatagtccaaaaggcagtgcaattatcaagttgtctaaaacattgtttatggacagctatctctttctgtgtaaagactgacctcattttgcacatatctaacatttgcaatctcaattgcatgaaacaaggtagataaactaggttgcatttatttcttttcctaaagaattagcaccagtattttgttagtcagttttaaattatgatgccatttacaaaattcaatttatatctatcttttcggaatacatatactgtgtagactatgtttccaaatttgatttttctccttgccttacccaaaatgttgaagaagaattttttttttttaattgagatggagtttcactcttgttgcccaggctggagtgcaatggcacaatctcggctcaccgaaacctctacctcctgggttcaagcgatctcctgcctcagcctcatgagtggctgggattacaggcatgtgccaccacggtcggctaattttttgtatttttagtagaaacggggtttctccatggtggtcaggctaatctcaaactcccaacctcaggtgatgcgcccgcctcggcctcctaaggtgctgagattacaggtgtgagctaccacgcctggccgaagaggaaaatttataataaaataaacttatggcagaaatattttaaaaatatcaaggggctgtttgggggttattctatatttatactaatcacccaaatactcatgtctatagagcttttaacaattggaatttcttacaatgaattataatatctttgattagcatacaaagataaatttatatttgctaaattattctcattaaggcaaatgttgaaataattatcagggtttcgaacaatgaattacaagctccttagcagagcaaaatatatgtgaatttactggacaagtcttatgaagacaagtactgaaactaacaagctattaaagctaaagttaagttggtcagaaaattcatgtaaccaaatcatttgaaacctgagttttgtggttaaaaagcaggctttctgttaatttaatttaacttaatttctgttgagtcttctgttttataaaatatgaaatagcagccccttagtaaaaataaagtatagaaatcataagaaagatctactataaaaaaggctattaagtagattattgataaatcagaactattacttgattagtttgttctcttctttgtgaattacagcaggaaatagtattttaaaagcatattagtatacttctatccattcttcaaaatctgggttaaaaatgtttcttgtgatatcactgctgaagaaaatatcactttgaaatattacttttttaaagttcagtttctgagtcctacttttaatacttgaagacacaatgacaattttaaattttttatttatatattttctagtatattaggatgagtaagaattaattaaaatattagaggctgtagggtctaaaatagttattaaggacaatatggaaagaccatctttcagaaggctgaaattgaaaaggaagcaattccagctgtgcagttggagagtaaatggcctgtgaagtaactgaaccaagttcctcaacatcttaaggtgagggcattttcaaattgtgaaaaatccttattatgaaattagagttttattacatgaatcttttgatcagttgtcatcttgggaagactaacttcaataattggtctggagagaggatggggcaaaaacttacatggggaattctatagcctctgtgtgaggaagaggttagagataaaaatggtgtttttacttaaaaaaaaaaaaaaaagaaaaagaaaggagcaacatgcatgttcagtcctgattgctttctggatcttgctaaagctgctagaacatttcctgtgttatcgattttgtatattacctcagttcacctctgctgacagcagttggtttagctgcactgggattcatccaatattcccaaccgtgatgttaattctatggcaaagtaaataaaagctctgttctgacgtcataatcgctgagttggaacctggctttgccacaggcatgccttcacagaagtcacttaactaagtctaggttcctcatctgtgaactgagaaaactaaaagcactgattccatggggtgctgtgagtattaagtccatggaaggttctcagggggtgccttcccggagcaaaatatgcatgtaacaaatatcagccatcattatttctactaaagcactgaaagaaacacaactaaaagacctaaaacacagctttatattttatagtgattttgggggggcatgccataggaaatgatttgatatctgtagattttaaagtcaaaatgtttcatggctaattgagaaaaatcttgggctctttaagattagtgtgaggtttagagataataaatgtaaagcatgtgacatagtgcctgacagatactcagtaagttgtaggaggttctattattaccaatatcatcatgattcatacatttcttttctctccactttggcttgacatgtggatacatgaggccagtaggaagaagtcacccatgactatctggaacaacattgtggggaaggccaagtttctggtcagtacagagccttcaaaattcctttcccctcaaaaagaggggtccctctgatacctgcttgtctagctctcccccctgccaccgccagatatgtttttttggaatgcattcgttaaataatgaaataattgagttccatgtattctcttcaggctatgtctttgcatttggactgataattcattaagccaggataacgatggaatggcctatgtgggtagctgtaaggaccctgtgatgatctttccgagtttcagattgcacgataaccttgaaacttacaaacctggctttggttgtaaaggattcatgttcaagggaactactgaatggaagttatcaaaagtattaaaatcaacagagcatgcagagaactacaggataattactgtggcattctgttaagatcatacttgacttagaaaactagtggcctgtagattcggtcttatttgccctccaagaatacttatacagcaaaaatacccattcctctggaaatttactctcttggcaattgcataattattattattttttaatctagaaaccaccgtacattcatttaaaactactttgagataggaattttacttacctgagaactgtggtctcttatcatgacttcagttttctaaatttaacttatggatgtataatcttattaattaactgtgaacatggtttctgagagaaaaagacctgcctaatgtctaccacccttacagtataagagcagcaggatcttcgtctgtgtgcgggaaggaacgtcacaggattgggactatgtatttgtgcactttagaaatggggacagaggctgggaggaagatctaagttcattgaaggtgtgtcccaccttactccaggggtagtggatggacttgaaagctggacagaagaatcatcttactgggtggcagtggcctcttcaggctttggactgtggagagacacctgcctctctgtaagaacggtaaaaagcctccctgcctgtggtacttggcctgtatgtaatatctcaaaggcggttaggaacaggaagaaagttcctctgacttggtgtttccctgaaatgctgattagataaataacagtgcatgccgcacaatgacaaaagcaacttataaacatcaagggttatgtgaggcaaccgtacatctgattttggtattgtggtatttgatatttcaagagactaaaataaaagagaaagtataaaaataagcagtttcccagggagttatggcaaagctcaggacatcaaacgagactgaaccaagtgagaagtgcaactacctccaagggtaaaagaaataggccgggcgcagtggctcatgcctgtaatcccagcactttgggaggctgaggcaggtggatcacctgaggtcgggggttcgagaccagcctgaccaacatggagaaaccttgtctctactaaaaatacaaaattagccaggcgtggtggcgcatgcctatagtcccagctactcgggaagctgaggcaggacaatcgcttgaacctgggaggcagaggttgcagtgagccaagattgcaccactgcactccagcctgggcaacaagagtgaaactctgtcaaaaaaaaaaaagaaagaaagaaagaaagaaacagtgccagcctaccagaccatctgaagtagtctgtcttactccagtggagcaggcttccccaagctgggggccaaaaaaccccagggaaacacagggttcatcaaataatggctaaagtgagctcatttttatatctatacaaatataaacatatacaatacatgtaaatgtacagatttgtgtatgtaacaatcatttaagggtgtatggaaaactacttaaatatactatttatggtagtgttttatcttctcaagagatactaaaagctgtattatttttatacagaggtctactaaaatgttttggctctgaaaaatgactctcacttgcaaatgctggaatttagagcaaaacagtattcccttcctaaaacaaacataacagtcataacggtattccatttctgaagcataatgatacacctatcaaaatggttaacatttgagtttgaattaggttgtcattgtttcttctctctctttaatacattttaaaatatgtttttctacaggtgcggtcttactaagttgcccaggctggtcttgtactcttggcctcaagcaatcctcccacctcagcctcccaaagcactgggattacacacatgagctactaggcccggcctcttctgtctttttgtaggtgtgtttatgaactaagtagtgacccaatatgaatttccaagtcaaagggaacaactgcaagacaaataaggtagtcagggcccttcaaacaaaaataagtgccctgctgtcatgagaatcaacacaatctcctctgggcccagcaaagagaggaccctctgcctccttctcatactctgtgtgagcaccaagtgaccatccaaactattttagggcagtgctcaactggggcaggtcacaccatgtggtccactcccattttttttttgagacggagtctcgctctgtggcccaggctggagtgcagtggcacaatctcagctcactgcaacctccgcctcctgggttcaagtgattctcctgcctcagcctcctgagtagctgggactactggcatgcaccaccatgcctgggtaatttcgtatttttagtagagacagggtttctccttgttgctcaggctggtctcaaactcctgacctcaggtgatctgcctgcctcatcctcccaaagtgctgggattataggcctgagccaccacgcctggcctgtttatttttataagtaatgatttgctttatgcatctccagatttaatatgccactctatccaaaactgggaaaattttatttatttctcaaagttttttaaataaaccctctctacagacattaggaagttaattagagatacttaagatatttgggtcaaaaccaaaacatttaaaatcatttttagcaggaccaacttttggtatgaaataaacacatactgaaatcatctgtaaatttactattcataaacatagcttaagaaaatacctaacgcagcactctacaatgcagtgcccgtgaatgaataaatgaatgacacctgcccactgtttatatgattccatacgtatctcggactatatgcatgactctaatacatgtgaatatggtattctatctatacgaaaagacaaagatctttcttctaataaatgaatcttttgctcattataccccaagtccccatttgggagaagtgatatttagggaggaattattgggaagaggccgggcgcagtgcctcacgcctgtaatcccagcactttgggaggccaaggcaggcggatcacctgaggtcaggagttcaagaccagcttggccaacatggcgaaaccccgtgtctactaaaaataaaattaaaaaaagaaattagcagggtgtggtggtgcgagcctgtaatcccagctactcaggaggctgaggcaggagaccagcttgaaccttggaggcagaggttgcagtgagctgagatggtgccactgcactccagcctgggtgacagagcaaaactccatcataacaaaaaaaaaaaaaaaagaggaatgattgggaagatttgttgtccatctattccatcatatgctcacttgtcttgttggttgaagtcgaaccatggaatagaggatgttcggccaaatttccttgctaccctgctagtctgtctgtccaccttaaatgttttcgctgggttaccttttggtattataatgttagcttttatagtaagaaactcgtttagagcactttaatgtaaaattccatataagaaatttattttagagctatgaggtagaaaaagctcggttctcctgaggaggtgttatttaccgtctttataacataattgtcatgtttccattttaactttggccatgaagaaacacattttgtggcctggatgtttatgtttagctgtttttctggagagctttgcttcttgcctctttttattttgtttcttgatgatggatattttctttaaaatcacatattatccttatgtataatgtgattttagtttccgaggttttattggtaagttaagctacctcagttctttagtggaaaatacaaggatatagatgttattataggtatagatacggaactcttagctaagcacatgcactctctctccctccttccctctctccttcctgtgcgtgtatttaaattgcacaattcagtttaagtcatttccaatcttctccttgtacaaatgtgcctttggtttttaaagattcattagacctatgctttgtcttggtaaacataaccatatacacaattgtctgcctttaagagaattgaaacaatcccagaattgtgttcccaacatagcttagtataaggtgtaattaaacatttaaggacatttgagaggcaactgtggaaaaccgacctggagaggtcatcgggcagagccatgctgagctcctcaccactaccatgcacattctcccaaaacaagcgcattctcaggatattgcttttgctttcttcttcttgatgagctgcttcacacacattctattctcaagaaccaacttcctacctgacctggctcccatctaacttaataaaaagaaaacctgttttttatttcatctatagataaattatggtctgaaatgaactactagtgaacccatgcaaaggctatatatatatatatatatatatatatatatatatatatatatatttgtatacacacaaatatatatatatacacatatatatacatgtatatatatgttagtaaatggccactcgaggtatagaaagtcacccaaagacatcacaaaaactatttaaatatttgaaatataattgaaacaggcctattctcaatgaaaaaaaaaagtgccacgttccctctgacttctgattgctaaatcaaaacgcttagaaagggtttgttggaaaatgaatctgtctgtcgagtaaactcagagaagcgctcaaagggatcgccgagtaatgattctgaagctgtactgtgtttcctcaggagacaatcttctagacctctgaaatgaatgagtccttaaccaaatgaatttttgtaaatatttctataaactagtaaaaacttttagagcaaaggagttcatctcaggagagtaagatataggagacccacaatgatggaggctctgttctatcaagacacaaaacagataggttgagccataaaacatgaaaccataaggctctaaaatataacccttgcataacatataaaaatatatgaatatatgcattatacatgtactttatatacatgtatttttatataatacatatataaaaataaattttgtatatttatataaattcaacaatcccactactgggtttctacccaaaggaaaagaaaaaataaatttggtatatttgtatgaatccaacaatcccaccactgggtttctacccataggaaaagaagtcgttatatcaaaaagacatctgcactcatgtgtttactgtagcagtactcacaatggcaaagatatggaatcaacctaagtgtccatcaacagatgactgaataaagaaaatgtggtatatatacaatggaatcctattcagccataaaaaatgaaattatgttttttgcagcataatgaatggaactggaggtcattaccttaagtgaaacaactcaaaacgtcaaatactttatgttctcacttgtaagtgggagctaaataatgtgtaagcatagacgtagaatgacaagcattggagactcagaagggctaggggtatgtggggagggggtggatgatgaaagatgacttaatggggacaatgtacattatctgggtgatggatctaccaaaagcccagacttcaccgctacacaatatatccacatgacaaaattacactcgtacttcttaaatttatataaattaagataaataaataaaagggtaaaaaaaagaaaaaataaagtcattgcattaaaaatctttcaagcattgctttatcatcgcataaatgtagccaaagattctgaagaattatgagggcttctgtgaagacattgtttcactgccactcaatataacttgtgaaaactttggtcaagaactctaaactaggaaaacatgcaaagaaatgttcactcatagcaatatttgacacagttgatttttctgctgcatttctttttctacaaagagaaatattattcaaagagaaaaaatttgccaggcatggtggcaggtgcctgtaatcccagctactcaggaggatgaggcaggagaattgcttgaacccgggaggcggaggttgaagtgagctgagatcgctccactgcactccagcttgggtgacagagctagactccatctcagaaaaaaaaaaaaaaaaaaagaaaagaaatatattcccttcaatgtcatgcctggctgtgtgtctgacactgttcaagatctaatgaaaggaaatgttaagacacacctagtatgtgattcagcccaaattccagccaggccaaggtggctctgcaactgtgctctttgccacaaatgaccctgtgtcctgcagaataaaggacactacaagtaatagcactggagtacaatgtgtgccctatgcatatatttataaaatgctatggttcccactgacgagaagggcctggccacaccctactccattttcaatgcgtttcctgtgtttctatctcttactgaaaagaaatgctgattttgtaacaaagaagccttgctatccttcaaaacccctttatgaagttgacttcattttatcctctccatttccatcaatactcccaactctggagactttctccccattcctctcctgtcctcccttctctcttgcctcatattcagaacacagatagagcttgaagatcatggcttctggtatgaaacttttattattcatttatgtgtttgtttgttttttgagtctgggtctcactctctttcccaggctggcgttcagtggctcaatcatggctcactgcaggctcagcctccttagctcaacctcctcccacctcagcctccttagctcaaccgcctcccacctcagcctcctgagtcgccgagatggcaggcatgagccagcacatctgactgcaacttttattctataacctaaatcctgtgggtatacaaagatgcagatataaacaggtatcacagactgtattatatatgagaaataaaatatttataatttctctacatcagtaaatcagaatttaacattatccaaattcccttccagacttttctcaggtgcgtggtttcagagtaggactcgtttcttatatacaatgcggtgtttgattttttaaaaaaaaaaaacttcccttggaaaatactaaaactattatgcattgagtcatttaatattcagaataacctcacaaagcaggtgttaacaacttccattttaccctttataaaataaagactctagagagattagataagtagcttgtccaagtttacaaacaagtttatgccctttctactgagctacatttcctttattgtcttataacataaacttatctcatatgtctgataaaaactgtccaagaggcttcaaaattatgatgattttcttttcttttcgagacagagtctcgctctgtcacccaggctggagtgcagtggcatgatcatggctcactgcagccttgacctcctgggttcaagtgatcttcttgcctcagcctcctgagtagctggagctacaggtgtgcaccaccatgcctggctaattttttttattttttgtataggtggagtctcactatattgctcaggctggtcttgaactcctgggctcagtcttcccaccccagcctctcaaagtcctgggattataagcatgagccaccacgcccagcctgattttctccttgagtgcgcaagtttccctcttggtggatacacttaaccgcactttaatggttctaagatacacattttaacatctaagtcgggatgtatctcaagatcaaggacaactgacatttgctgtcacgttggccaggtggcagcggtgacagactggtcactgcctgcaggggcttaatatggttatagtttcagtggcacaactgggcaactgtaactcatttatgtcaggtccacagatgacaaggatctcttgcagaaaaaatagaagacctggctgggttctgaaaacctcttattgacacattattagatcaagaagcaattagcatcaacattcacagaacagtttgtgagcaacttgcaggaagatcccagagatggctgcagggcacagataagaaatgccacatcactagtgctctccatggcacagagaaatacttatggaaaaacatggactttgatgattcacaattgaaaagtgactcagaagagctggactttgtaggagaaaaacattgaaaataatctaaccaattatttcacttatttttcattttcatgtatgcacaaaatgcatgtttaaataaccctaaaaaactctttcagtaagtgtagtttttaattagcagtgcttctttcttttctcagtggtgtgtagctagcctcgtacaggtgacaaaatataggtaatttatttgaagcatctcttattgtttggcactcattattttcaaatgtttgctattaaagatagataatgctaggccgggcatggtggctcatgcctgtaatcgcagcactttggaaggccgaggcgggtggatcatctgaggtcaggagttcgagaccagcctggccaacatggtgaaaccccgtctctactaaaaatacaaaaattagctggctgtggtggtgggcacctgtaatcccagctactcaggtggctgaggcaggagaatcgcttgcacccaggaggtggaggttgcagtgagccgagatcatgccactgcactgcagcctgggcaacaagaacgaaactccatctcaaaaaaaaaaaaaaaaaaaaaaaaaagagtttctattttgtcatagtaggagaaaagggaaagggtattcaaaacaagaagctgtcactaaacaaaaaatcataattaccttgagatcctggcagcttctttgttagccctccatttcaccatgctaattataaagaaaagtaaacttacattttttgctctggagaacatcaagcaaaatatttgatctgctgtctaagcacctgatggtatgaacaattggaactgttagacaacaaacaatagcattaaacactcaccttcccgtttcgaatgttacataataaacagccggatactgctgacattaacacccattattgtgctgcattagttttatgggtgcaataaacactcctggatgatgaacattttgtaattcaaagaatgactcatggaaaatagttttcatttgctaaagtgctgcagggttgcattaaaaaatgtcttgctgtgctgaaattgattccatctgaacggcagttcaaaagctaccagcaactttaaaaatgcacaaggatgttttgcttctttcatctatttgggaaaacagaagcaaccaaatataataatgttcctgggacccactgcatggttatgtcctgttacataaacaagcattatataaaacagagtcatgattagcctatctttttatggaacaaataaacattaaccaaataaaaccagtttttaccagatggcatccaataaaatattaccattgaggctcattctgtccaaacctttaaaaaatgttaccataccttgatttaggttgacctgacagaccaacatctgaacttttaaaaaagattttaccaaaggattcgctgagtgattctttcgagacgagtctaaaccaatacaatcaaatagaattcagttcaaactgactgttttctctgatcgcaatgattgtgttaaacggtaagactgaagaagtcacttcctattaaacattttctcatttcgtttcttcttggggatttaattaaaccagattctgaagaggatggtgactagttggttattgttagcaagacaggagttagagcaaatgacattgtaacaccaggaatgtctctctttgagattttaaaactagaagagattctcattattctggattttaggatgtatgaatgactcttcaaagactcattcattgcaatggtttagtctgaatgtaatcccaggaaaataaatttgtttttgagctctgaagatccaatatctaaaatgttgatgtagaaaacataatttaatctttataacatccccatgtgggacatggttagctctagatcactctgaattttaatccagtagtgcttcataagaccatacacctttctgaagggtttcagagcacaaaccttcaaatatgttcagttattgacacacaaagcttaaaaataagaaattttgagtaccaaaacaagtatgttttaaagtactcactcttcagtctgaaattccatgattctatacctgggttattttcactgtggacaataactagcttgctctagctttgccaatgttgccacaaccatctataaacaaactcaaaaactgaaaaatagaaaacaacactatatttttcattttttctctaggaaagttagaaataagtatattttctctcctttcaagttctgaaacaaaaaccccactaatcgtgtatacttgcactgactcttgcctcagtaaatctcagttaagtaatttgttacagtagcatttcctcattctggtataatttttatgtacagactgttttcattatttcaccctcataaaaatatacttttataatctagcctacagagttgctactcaatcatgtttcataacaagttctataggtacataccggaatgttattcaccattggcttagaatttaacagtttataaaggtgcaaatatctgggatttggggctgaaaggtactattatgttattaccgtgaacgcacgttcattgtaaatactgtggtaacccaggcctgaaagaatctatgaagttaacattatgcattttttgggttttgaggtttctgaaatgcatccatcactcctgaccaattgacgtttacaaataccacgaggcctgaccatcaggcagctttgttttcattccctgcacggcccttgccctcttcctgtctcggcatctttatctaacctctgtaaccagtcacaactcatttattatcatctgaaaaatagtgctgaaatgtttatacacaatcaatttgtaattaataggaaatgactttatggggtcgtttgatccctgctggtgggagaaagcctgggttatgtctaatggattttttccatctccttcagtggtgacgtgtggcaaatggattgtaaatgaagatagactgtgtaatgaatgacgacactaaagactaatgtgaaggactttagggaaaacaaaaggctttcatctgaaaggatgatctgtggaccaaggtcactcataccactcactgctcattttctcatgttattttaaaacttttttcggcctttatactgctttcagcagcatttgtgtgtaagaagtggacgatgactttaataaagagacccgaatggaactgaatggagcatttgtttttgaagcaacttttactgtcctcagttttatctcatagaagcctccctccaagggcactgccatagactcacatgtttcctctaatgccttgaaaagcattttcctaaaatgaaggtcttgggaacattttacctgttggccagaaacctaaatagtaatcagctctgaaggtcattctgatggcatggaaaaagcattgtgctctagaggaaaaagctaactacgagggtagcctggggaggaccaggagagtacatacaaacaggttttgctgcagtcacactgcagacgtttgacatctatttttctgcttttcctttctacatttctctcatttccttccctctttccttctcttttgtcctttcttcctttctcccaaaaatatttattgggaattccctatgtgctacacttgtactggtaagaagaaaattaacaggtccttctgccccccacccccagcattaagtttaatgaaggagagatattaatactcactctactgaatgtatgattgcaaagcaagataagtgctctggattaaaggaacgtagctctctaagaaggttaagtaacacaaaaaaacctaaccctggtaattttgaagatttgggatcttgcaataagaaggtttgtaggtgaagtaatatttgacctggaaactgaagactgtggtgttaaccagacataaggaggctggaggaagaagcagcataagcaaagggcccgtggtcatcaacgatctgtatgaacttgtataggaagaaagcagagagggaaatggcaggtggataagtaaggagaagcgagatcacaatagggtcaagtgggtcaggaagatactgaagggtttccaactggaggaaattagagggccactcagggtgcagtatgagtcatggaccggagggaaacaagaatggatgcaagaagactgaattaggaggaatttcagagtccaggtagaagatggtggactttgatccaaaatcattgaaactaagaaaaccaggggcctcagatgttctttggtctgttttcatctaaaaactattgtatggatatggctgtcccaccaggcagcaaccagaagttagaggtgggagcatggcttgcagagttattctggacatgtcagtctcagtgcctgtcacgcccacagttgcttttgagtgcaaaccacccagtcacctgcctgtgaagcatagtgagccaattcattactaatgattatcacagaatcgatcacattagccaactgactcaatagctggattcttgaagtggcctggtataaaaagaggactggtttgtgaatagagaatttgacgcccaagatacgacactcccagcacattcattttcaacagtgcttctcaatggtggcaattttacttcccaggggacattttctgtgtctggagacatttttgattgtcacaactagggaggtgagaactggcacctggtctgtagaggagagcgatgctattaaacatgctacagtgcacaggcagcccccacctcccccaacaaagaattatgtggccccaaatagtaacagtgcacaggttgactatacaactcgtcaaatccttagaatctgcaaagggctgtcttttcgtatgctaatgagctgactcatggctggcagctcccaggtagctacaggatggggctgggtaccagaaagaccaagccaggattagagggttgggacttttggccccaccccaacctcatgggagggtagaggggctgaaggttaagtggatcaccaatggccaatggtttaattaatcacgcctatctaacaaatactctataaagtccctgaggacagggtttgggaagcttctggagagctgaatacatggagtttcctggagggcggtgtggcagggaaggcacagaagctccgcaccccttccctcataccctgccctgtgcgtctcttcatctgtatcctttgtatccttttcatttctttgaaacagggtctaactctgttgcccaggctggagtgcagtggcacgatctcagctcactgtaacctccgcctcccgggctcaagggatcctctcacctcagcctcctgagtagctgggactataggtgcaagccaccatgcctagctcatcttttgtgttttttatagagacaaggtttcgccatgttgtccaggctggtattgaactcctgtcctcgagggatccacctgcctcggcctcccaacctgctgggattataggcatgagccaccactgctggcccataatatcctttataataaaacagcaaatgtttccctgagtcatgtgagccactctagtaaattaatcaaacctaagaagggggacatgggaaccccagctatagccagccggtcagaagcacaggttattcaacctggggtttgcgactggtatcaaaaattggggagaggcagacttgggactgaaccttcaacctgcgggatctgacactattttcaggtagacagcatcagaatggtactgaactgggggacaccctactggtgtctgctgcttgatgagtggggaaaacctccctgacatttggtcactgaagtcttctgtgttgattgtcgtggtgtgagagcagaggaaaaacagtttgtgttttttccactcagattgagaaaccctgactgtcaacgatagaacgggtcaagacttccatgtattatgaatatggcagacaaaataaaattcttagtttcataacggaaataaaggagaaatgtgatgttccgggaaagcagctgagacacattctaacagtatagcttatttgcaatacattgggtatttactcaaccagtgtttactaggcatcaaacaaactcaaaatacttgttagaaaaaaagacaatacctaagatgttttcacagattcactaatcaccaacatttctttgaatgtaaaaaatcttataaaggttgtttgcagaaattaaattagtaatttcccaaatttgacatgctatttgattctgttagcagataatacaactaacttttttttgttcgtacgttttcatggttacagagctggagaaagaaacgttatgtatgagaaaatactttggtttaaattgtttacgagtaatttctctcatactgatgtgctaaatggcttctctttgtccctccaggtcactctccatcttttccgccagtgcccaactgactgatctttacagatggtgtcaacagatgcatctaccctctggcttcaagttgagttggccaatgaagggtgagagaaaactgaagtagggttctttattcacccagcccttccccaagaggtcaccacggcctcacggtggcccccatggctcatattagagagacatttgcgtagctctgtttccactcacctcttccagcctagggtgggagcagagcccctacaatagctcttgcatttgccttatatcacggtcacagcaccgaaaatagtctcattattaaactctcactgaagaagtgttctaattgaattggactattctgtgctgagagcctaatgagtagaacttctctaatgatgatgtagatgttcatgaagatttacagtttccacgtatgttcacccagtacatcacaatggatgcacaaatgatctgtataatatatacatgtaactggaatgagtccacagatgcagcatttgatgtacaaaaatcttcacaaaaccaaagcatagggcagaagaaaagctttgtaactctttaaattatagatgattccaggcatcagtgtagtatttgcatagctctcttagaacaagggacactgggaactcaggaagaatcagaactcttttcatgaatttctttagtgcagtcaagtttcctcttttatgaaccagcatagttaacccatcttctaaagaattcgttcattaccacttacatagttcaatccccagcttgcttggagattgaaaaatatctctaagatacttgattacataagtgttctgcctagaaatcccaaaactcttactctttttgctgtcataggaggcgctgcggaaagtacatgacatttgcagttgtgggcgactgtgctgtgggatgaaaccaggctcctcatcaagatgaacatagattcaagtctccatcttagccatttcctagttctgtgattataaataaactccttgacttttctgagccttagtttcatgatctctgtaatgagaataatattatctcttcccaagcatttgataataattaagtgaggtgatataaactgcctagaccagtttttgactgtagaggtttttctttctttctttctttactctaatttcacctctggaaaagcagtcaaaatgagaaaagtcaaacccgcatcagaaaagaagcaacttgacacacacatgcaattaacccacttcaccaggatatgtcaccaaattgacatcaccagaaatagctgatacaatggtttgcttcaccgtttatcagtaatctcttatcttctctttcctttttacttcgctcatatcttattgtcctgctgtcatcttttcatgccatgcatctctgggacacccagcctgaagtggcatatatttgatgctcaataatacatggcagatgacataagatattggctttgcaaaatctaccgctgttctgaactatcatacaaaacaattagttgttagtatgccatctttcttattaatcttcctcaataatatgaataatcttaatatttccatttaagaaaaatgcaagctatatgttattctcatttgacaaaaaaattattctaagaggaaacattggaaaatgagtttcaaaatagtggtacacaaatttgattctatgtcaaatggttttaaatataaaagtagcataatcatcaggagaggactttaaaattcactctttctacagatcttgaatggccagataaaaatcagaactccaaccagttcccaccatctctgatgtgagctcctattttgtgtgccggatgactcagtggacgccagcagcagatcaatttaccgtagcacaaggtgtctctgtcccaaggtttgtgtacttgcatttgcggcaagtccagtcatatattacacatctcctctggctgtaactggagaccgtcaaggtacaatagtgctgaaagaagtgtacttttccagccagggaatttgtaacagatcctgcttcatcttgcatcgccatacaaagtacctccattccatccttcctaaaagtgcttcagtgactgaaagtggaaaaagtggagcagaatagagcttgtatgcctcagagattccagccatccaacagtcctaactcaatgtaatttaaatcttgcatgtttttacttttaaaaaaatttggcaactctaaaaaagtttaccagaaaatagtgtatctgcgaattttcactagtttccttcaagaagctaggattttcgtagactgaatacattaaatattgagatttaataaaattaattttgctgatacaaaggaaaagtgaaagaaaaagtgagacagaatactacaattctctctttcagtgataagtaaatggtaacaaaagtcatctgtacaaattcacagaatatgatgtcataaagatgggtcatcaaaatgcttttcagtgatccattcaataagatgtcccatcatgagggtttgagtagcgaataggaaaggaagttgtgaggcttcctccttcgatgggagcccctcagcacctgagaggcagagggctgggcggggaatgctgatactttccttgtcaattacgaggctggcttccccttcatgattaaagagcagaaaggggcaaatcagatagctcatggcttaagtcgtttgcattatgtgtaggtttcaattttccatggttcccattctcgtagacgttagacagctacgctttaatcttttccttggcagctttaatctctctccactcagccatttctaaattggggataacatcaataccgtaaggattagctaagcatatctgtaagtacgtgacaatcactgtaggctgttttttataacgtgacttcaaaaccgaatctgttacggagttgctcaagttaaccatctcccgataatgagttgtttatggaggtgaagatgaacaacccagatgctttgcaatggtggcgttagaaaaatattttattaaatttttccctattatcctggaggaatatgtcacacaacaaaatatggagagagaggaagagaaaaaaaaagaaatggaaagtattttaattgatcaggagttcaagactagcctggctgatacaacaagaccctgtctctgaaaaaacaaagaaggacgaagtagaaagtatatttctgagaagatacaggttatagagatcctcagttcacaaagcaatggatatttacttttccactatacagccctatcagccgaccacaacgctggtttgctatttttagccagttcttttctgcaggatgtctgcaagccttccgggatttcaaagcgatccttccagtcttcttcaaaaggagtagtcttgcattccccaacatttccagtatcaacactcttcagcaccttcacctccagagattcctttattcagactgccctgctattggagctgcctgttacaggaacactgccaatcacgtaagccacacaattgttaaaacactggctcacattgggaaaacaggagttgttcatttcatggaaagcattcttcatctgatgaatggatttggttatcaacatagtcctttcattggtgagcccctgatttatttacacttgccacagctctaatcaggcacatggtagctgtgtatggtgaagcactggctttcaggagaattcttttagctttaacagtcgtggttagcataactatgtggttatcttctactgtaaaaaataattctaggacataaatttgattaacttctggaaggttgttgataacagtggtcctctccccttcctctctctgtcccagcccctcattggagtgcatcactcagaatgatttctagtgcactaagggagaacacactgggcagagcagccctgggtcttggctctggctttggcactgagcaagtctctgaaccctccccatccctgatccttcatggaaggttccttccagctcttataactcacattcataggaacgaatcatggaattgagcctcagaaatgaatcctatttcaggaacttttctcatttcttctggaacgcatcaggtttgcataacctatgttttttattgagagtgatatgacattctgctttccttcttgttttatcatttgtaattaatgacagctattggcccaatttctccttcatgaaattacagcgattatcatttcctttccattttcttagaaaatcttttgtagactttctgtatttcttaacattcagcaattgttatagttcgcagagtgctttatggattacagaatggtttcatttagcttttcctttaaaaattgacatgctcatatggcagatattattattctcatttctaggggaggagaggaagacctaggaaatatagtaacccagtttagtttccttgctagtaaactgagggaactgaaactgaaaattcatatcgtttgactcctaactcaagtagttaggactgtcaagttagatacaaaccctgaacgaagctttctaagaggcctttgggaaagctatttaatctctctgagcttcagttctctcctctgtagaatgggaagaatactggctaagtgtcagtgaggttaagagcattaaaggggataatctgtatggggggagccccacacagagtccagcagataatgagcagacactccacaaaggtgagtgtcttgtcccatcttcttctatagtcttccttgtctctgttgtggtcaaccttggatctatgctgcttatgctggaaaagtacgccctgcctcctttcctgagtaacttattctttgggatcagtcatataatacttaaaaagaattattttagagatggggtcttgctttgtcacccaggctggagtgcagtggtgccatcattactcactgctcctgggctcaagtgatcctcctgcctcagcctcctgagcagctgggactgcagacatgccaccatgcttggctaagtttcttttttttaattttttttttttgtagagacaggactttggtatgttgcccaggctggtctccagctcctggcctcaagcaatcttcctgcctctgcctcccaaagctctgggatttgtgaaccaccgtgcctggccaatttttctatagacctttgtataccaaatttgtgaaactccacttgcaatctgattggcaatgagcattcgtttgcacgtgatgattactctggaagtgtaagctctaccccctacatttgtaaatgaaaaagacacaaaaggagagaaacacttctacacgacctccttccttagatacagtatcagggttctaacattaacttcttacatttaaaaaaaaattctgaaatttatttaaaagaactaaagaagaaaaatatgtctcttatttccttggatactttcctgaatactaaaatcagttaattttcaagacaagaattgttaaaagacgctcaatcaataaatgaccattcctttgcgatgtgtattactccactagaatggaagcagcatgaaagcagatatctgtctcatctgttttgctctttatctccaggtggtacagcagagccaggaacccaggaggtcacagtcaatatttgtgacatgaatgaatgagtgaaatgagtacatgaacaggttgagtggtctgtgagtgtgaggatagatatacagaggtacagaagatgctctcctgccttcagggagcttgcagtcagcctcaagagacacaatttacaagaaaagacgagtagtccacactgccagggagtgagtgggtggtgtccattagagcacaaggagggagcctgccttagaagtttggggaagcaaaagttcaccgtggggccagaaacctcacttcgttataggagttaataagaaattattttaggcagatacgaaaaagggtccttgccaagtttttgtttcttttaaagtagctcaagaaacatttcttgcctagcagaaaagcccccaccggcaagctttgatatgcaaatgtacgccattagaaactgggtccacccaaacaaggcaatacccgctgtcttttcctggtgcccacaagtgcctggcaacatggctgccccacataaccccacgtgtgtagaacatcatggcgccctgcatttgcatattaaaagactagggtgggagggccagttatttcacgggctatgtgaatgacatgcctggtcaaaccaatcccctgtgccctatgcaaatcagacaccgcctcctccagactcctcatataagcagccactttgctgccgcacagcgagttttctctttgttccaatccccactccctccgtctctatactggggagctgttttcttcttccttccttctttcttgcctattaaacttttcgctccatgaaaccactccatgtgtgtccgtgtcattaatcctatcggcgtgagaccaagaaccctggtgttcctccagtcatccgagtcgtatcaacttgttcccaccccaaaaatcactctgacaaggcttttcagtgaatacacgcagcattaaaacaatggccatattcaagccaaaaagttgccactgattgagtttatatgaatgttgagaccaaaaacacaaaaacagcttgccatgatataagacaatggttttgtttgcatctatgacattctcattgttatattattacttaatattctgataaactgtgtgatttgctgaggccactttggactttttccctaaaacagtcattcttctttttgagaatatatcctctaatgccactggtccttaaatatgtacatgtacagctgggtttaaaattgataaacgcattgtcttagagtcctagccctagaggcagaataggatgtggtgggtggtcagaattataattagtgcaagaaagggacacattttacaaaatagcacattttttttctaattttaaggatgaaagtactcaatggataactgaaaaacacagaaatatatttttaaaacgcatctccccccagagagaaccattataacttttgcttgcattcttagtgtcatagtcgcatattcaaaatatgtatgagacgcgtatatttgttcatgtctatttaaaaagatacattttggaaatatatgatgatgactgttaaatgtcagacattatttactcactctacacatttcgctgagtgacaactgtcagcatctgcactgtatcggtaggcatgggggaggtggctggagaagaaagcacacaagattacctcctctcagagttacgatcccatgggtcaagcaggtattaggcccaaatgaaattttaattacaaaacatatatgcaatatagagtccgggtgcagggtgacagggcgctataagaaagaactaactagggactcaatccatatcacagagcatagaagtctcctctggcaagacaggacttaagctgagaggtcaaagataagaaggcaatttctttgatggaagggaggagcgctgtgtgggagcgaaggattccagacacagggaacagcacacacagactcggaggagccacactacccttcctggagtgcagacagcgaggtggagagtaagctgaaacagagctggagagcaaggactgcgctataaccgcgctatgtgccaggcttgggatctcacgtgaaacaaatggaggacctgatggcttttaagcacaggagtgggcgtggtctaatttgcattttgaaaatgactgccctggctgcaatgccaagagggccgtggtaagaggctacagcatagtttccaggcaagaaggcatggtctctcgaactagcgtggtggcggcacgggtagaggaaagtggatgagtttaggctgagtcctggaggcggtgccttgtcgcctacagactatggggctgtattagggagacaaaaaaggagataggggaattggacaatttttggtatctggcatgatcatctcggaggtgatggaaacactcatatataaatgatgggaggacatctagttggaaagcgtttcgttttggacgtgttgatttgaaatgttcaagttgtggttttgttttttttttaatggcaatgtagaattctattataaaagccaatttttaaaacacaagtatactacttctggagcacagtttgtttatattttatattagtataatttaaatattgttctgataaacatccttatagatttacctttgcccatatctctgtttacttaggaaacatgcgaggttaattgacatatttaaaagctttttgatgtggcacaaggatctttatttctaagaaagtgactttcatcatcactttagagcacacgggctccccttacagactcatccattgctgaccctgacattaattctatcaactaatcctaatcacaaataagcaatccttaaccagcagaagaaacctaggatagctctatataagccacaagccaaggaaaagttgaacaaagaggattttacggttctttactttcctccttcttattgaactgccatgctattataaaatcaagtcaattttatatgtgatatatatgaaatatgataccacatattatataatatatattacacattgtcatatatatgtgaatattatatgtatataaaatatattcttacatacaacaatacatttacatacataaggtatacatattatatataatattatacatattatatatgtgtatatataatttttgtttggttttcctaacttataaaaaaattttgagcactcagtccttttttttattttttattttactttaagttctgggatacatgtgcagaacatgtaggtttggtacataagtatacacatgccatggcggtttgctgcacctatcaatctgtcacctaggttttaagccccacatgcattaggtatttgtcctaatgctctccctccccttgccccccaccccctgacaggcccctgtgtgatattccactccccgtgtccatgtatgctcattgttcaactcccagttatgagtgaggacatgtggtatttggttttctgttcctgtgttagtttgctgagagagcactcagttcttaaccaaaggctcctaattaagtattagtcaaaattccattacatcttaatttgaaaactacatatatttagttacaaaataaaagcccaattacttcaattacctatattgatgaaataaagttaagtttatatgtcatttctactattctttccttaagtggtttaatttgtcaaatatgtcatcttttcccaaaaatgaatcttgattaattttgacagtttttcttttcaaagcccttataggtactgttgttatatggtgaacactcaagggatacacaagtcctatcattttcatcaccaacacggacttctgatttgttttatttgatatgtcaccttgttgatttaacataaattgttttattttcttaatttctgaaaaatactcatattgctggtttgttttcactgaaggcctcctgtccattttttcccttctgctttatcaaaaaggactgaggtctcaaatgacccatgagaatatttaagtcacttatagagggcaagaagaagcatagaaaaaaaaatatttctggctgggggcagtggctcacacctgtaatttcatcactttgggggaccaaagtggaaggattccttgagccaaggagttcaataccagcctgggcaacatagagagatcctgtctctataaaaaataaaaattatttgggagtggtggtatgtgcctgtggtcccagctcattgggaggctgaggcgggaggatcacttgagcccaggagtctgaggctgcagtgagctatgaccctgttgttgcactccagcctgagtggcagagcaagaccccatctcaaaaagaaaaaaagaaaacatatttcttctttgtctaactccctgaacaaagagaaaaactactttatagacaggtcttgagcactgcgggagagtcaggcacgtggggccccagtatctcatggatttcatgtataagaagcttcttcttcttttttttgagacggagttttgctctgttgcccaggctggagtgcagtggcgcgatcttggctcactgcaagctctgcctcctgggttcatgccattctcctgcctcatcctcccgagtagctgggactacaggcgcctgccaccacgcctggctaattattttgtatttttagtagagacggggtttcaccgtgttagccaggatggtcttgatctcctgacctcgtgatccgcccacctcggcctcctaaagtgctgggattccaggcgtgagccaccgcgcctggccaagaaggttcttctttccagctttcttcagggatcatgcaggtatcttcaaagtctaagatgctaggaagtcatgggcactgtgttgaaatagagggcgtatgccttacataaacacatccaaactcttatggtaacaaactgtgctggccaaaggaaaaactactgtcattcaggccacgagtttgcaactcctggtttatcacaattatagtgatattcctttaaactaaacatttggatgtaatctttttccacctatagaaagagaaatcacccttataacagtggttttaaaactttagtttacacaagaatcctatgacgagcttgttaccactgtgggttcctgggcagcacctcacaagatttctgggtctgcaagtctgggataaacatctctgagacaggtgacccaggcttccacaagcgctgaaggaatttggattcattccaaccagttaacactcagagggtgtcaatccagttctgagaaacttcaagaaatcaacctcacatgatgtagaaagattcaatctgtaaatcatcatagctcttctttccaaagtcttttataattgagtttaaagcagagtacaagcaaatatctcatttgtatgatccatcaaaggtcaattgttttcattatgatagcaaagaggttttatttgttgttttttgttgggttttttttttttttttgagacagagtctcactctgttgctagactggagtgcagtggtgcaatctcgactcactgactcactggaacctccgcctcccgggttcaagagattctcctgcctcagcctcccgaatagctgggactacaggcatgcaccaccacgcccagctgatttttgtatttttagtagagttggggtttcaccatgttggccaggatggtctcgatctcttgacctcgtgatccacctgccttggcccctcaaagtgctgggattacaggcatgagccactgtgcctggccgcaaagagatttttaaaagcctgattttgggcgtgtgtgacactatgggttgaatctcatattctgctattgacggggatgaacttgggcagtttatttcactctcaagcctcagctcagccatggataaaatggagataagaaaagaaatgactgcacgatgtggttgtgaggagtcaatgaggcaatgtacagaaagcacttaccatgcatggcacacacgagggcagaacaaatgtgtgttatctttgtcactacttttctacaagaatcagaacaggatgctaacaacatatgaaactgataattctgcacttgttttcagggatattttaaatggtcacctcctcatcccccaaacataacaagaaaaccccatagaattacagtttttattactttatgttagtgaataaaacttgtatctctattataacactaggatagaggtttttttgttttgttttgttttgttttgtttgagatggagtctcactgtctcccaggctggagtgcagtggtgcgatctcggctcactgcaagctccaccacccgggttcacgctattctcctgcctcagcctcccgagtagctgggactacaggcgaccgccaccaccacgcccggctaattttttgtattttttagtacagacagggtttcaccgtgttagccaggatggtctcgatctcctgacctcgtgatccgcctgcctcggcctcccaaagtgctgggattacaggtgtgagccactgctcccggccctggatagagttttaaactgggggattttgaatcctttcagctctctctgttttgataagatatttctccttatcactatcttatgttattctgaaggtgtaactcatgaaatatgatctgtcccctcctccaatgctatccacttgtttccaagcaatgaaaaatcatagtttctatattcttcttataaaataaaaagaagcagaattctgtgatggaaaaagtaataatgacttgtatacgaattctgtggatttttacttctcccttaattaatgcatcaatgctacatatttttataaaacactaagtccctgtgaaatgtatgtgcctctaaaaactcaatgcattgatatacctaccctattgaaatggataatttcattaatagtaagttagagaatgctgattaaatgaagaaaacacatgaatatatttaaagtgatgatatcttcactttttatggtataattataagtatatgaacaattctacacagaattacatacattatgatcacattagataatttatcattatgattcatcatttttatgctaaacagagaaggaaaaaggaagcaagacaataaggagggtatgggggaaaatgagaaggaagaggagaatccatctactagcaaatgtttattgaccaactactatatactcatgatttcaggagccaaggagaaaagttttaccttggaaaagcttatggtctaattataataactcttttactgctagagaaaaaaatattcatgacacttgttaaggacacacagattttatgaggggggacaccacaaggaggtttgtagttgggaagagtgactgagctcaactccaactacaaggacgagcggagactgatggccaagaagcaggctgcgggtgagcagatggaaaattactaagtgggaacatcaaggccgggggttattactaggctgactcaaaaataatcttgttgaaggcaggccagggtgataagataccaaggctaggggatgaggcatttgatcaggtaccaagggggatcagaccccaagtgcaggggactttcattaaactgacgcagcaggattcttgctgaaattagactaaatgggccaaggacagaccagagtgaggttagggagagagtcactgtcaatacaaaaaataaagaaaagaaagaaagaaaaagacaggagaggcagagacagacagacacacacacatgcacacatgcagaaagagaagaaagataacaaggacatgtaagtaaatggtctagcctctaagtttacaggagttaagagaaagtgagtaaaagtgtgtggaaaagaattcttatatgagattgccctagagtacatcttaagggaagaacctgtctctctctctctctctctctctctatatatatatatatagatagatatagatatagatacagatatatatttagtgtgtgtgtttattatatatttatttatatatgtgtgtgtttattatatacacataataaacacacaccttggtaaaccacttggaggaaggggccccaagatcatgaggaaatgagctgactcagaagcagctgaacagcaatgcttgcgggattaggaggcatttgtcagaggggcagctacgaagggggcagtggagggaaaaaaggatggatcccctgatatactgaagaaatcttgcaaaggacagtggagggtagagagtagggtgttaagtcaacttttaataaccacacacggttttgacatgtccactgctgcttgtctgcaagcagaagtggcgtgattcgatgatagtcttacttctggatggcaaggatgattttttggccagacaatactgttatcattaacaacaacaaaatccccacacattaagtactgggttggctgaaaacagacctataccaaatcaacacctcaccattaaggagctaagcctaccgcacggcattttctctttagccagagccaagattttatgagaaaatatgaagagaacagagagttgccggaatgcaatgtcactgcattgcagggctgtatttgttggcaagcatctgagaccagcctctgcaaactgctgtaggcagggcctggcctaaagcggatgagcccccctggggctcggttgccctggccacaccatgatccttctctatgacttaccctctgaagaaaacacagcttttcctagcagctaaaaaacagtttctctagacttttatcttccatgataaatgcagatgtttaagggtcattttgtaaattatccttctacaatgttttcagttctcaataatcaactacttgatactcacgagaaaagcagaattcttcttaagccttctgattcaaaatgcttctcctaaaaatgtcttcctctgctaataaagtgtttcacatcattacaacacggagaaaacatgtagatcccaggcagtccaggctatgatgaatatctccagcttttcagaaagacaaagttgattccacatcactgtgactcctaatgaccagttgtctcaagggaggtctgagtcacagtcccagcagtgtctccaaaggcagtacggtgctcatggataattacagtttcatatgttggtaaaaacacaatccacccagtgatctcatgtctactcgaacgttacagcagttctagagtatcgctgtagaatcatcgtgaactgtggtattttgcagtaaccattaaagtacaacagtgtttgaatcatctgtgggtctattcgtctgcttgggctgtgataacaaagtaccacagacaggatggcttaaacatcctgtgagaaatgcatcctgtgagaaatgcattatctcacagttctgaaggctggaagcctgagatcaaggttatagcagactggttccttctgaggctgtgcgggagagtctgttgcttgcctttccccttgctggccgtctttggcttccttggcttgtagacgcatcacctggatctctgccttcatctttgcacggtattccccttgcgcgtgtgtccatgtccaaacttcccctttttataaacaaggacaccacttatattggatcaaatgcccaccccactccaaaatgacctaatcttacctaatctgttaatttaccagccactcatttcccaaaaaaagtcacatacgtaggtactggaggttaagacttcagaatatgaattggaaaggaaacagaatttagccaatatcagtggcatttcagtgaaagtaggccacctgatatgaagacccttcttgaaaagattacagagcttaggaacataagttgacctccaactggctttaaagtctctctatagatggcctgctaagctgcacactttccagagactgtggttttgttctcaatcaaaagtctttccttcaaagcatttttccccataggaaaaaataaaatctttagggaagacacatccgtcaacttttcccagtaggtttcatttaaagtccctctctggttggcacttttgctgactgatttctcttttaaccctcatgtcttttcccgcatgccattgttggataatatagcaattcgaacactgtttgaataacaatctagaggacaagagcctttcctgctttcattcatttattcattccacagatgattttcagaaccgctcttcatggcgtgacctctgtaagcccttcaggataaaacatgaataaggcactgtccctgccacgcaaaggcttgcactcaccagtgaaacagaatgaagacacccttctagaataaaggcatccaatttgcttttgtttagaaaactctcacccttccacaaagcaatatgagattttacatattaaagaacaaaaaaattttggtcaatcacggtggctcacacctgtaatcccagcactttgggaggccgagacaggtggatcacctgaggtcaggagttcgacaccagcctggccaacatgaggaaaccccagctctactaaaaatacaaaaaacaacaacaacaacaacaacaaattagccagacatggtggcgggcccctgtaattccagctacgtgggaggttgaggcaagagaatcgcttgaacccgggaggcggaggctgcagtgagctgaggttgcaccactggactccagcctgggcaacagtgagactccatctcaaaaaaaaaaaaaaaatgagagagaaatcaaggcagttgctgacattcaactctaatcagatactcaagacggggtctgtctttctaaacactgttctgtggccccctctgtgcatccctagactgctcaaggagaagatgcttgatcatggctcttcgggatagtttgttactgagtcaggtcgcttctccataatttgcactttaggtgttttggatagtaccttctatgtatgaaatatgttctgcctttctgttccaagtcaaatcattacagatatcaaaatcagccaacaatcaaggctaatgtagctctttccccagttcttaagaaaaatccaaagaaacacagtttgtacccacaaaccaataggcaatgtatcagttagtaaaacccgatccaaattcaataactgagaagtttttctggtccttaaggcacaaggggttcaatcccaagtatctactatttccacaagcttctgtcccaccataaaggggctgagtctcagctatcaataccacattttaaatttattattttatgcttaaatatcacttatctgtaacaagaaactcaaaactaagccatgggagataacacgtttaagagactccttgacttttgcatcagttttctctgcccccataagcttgttgagatataaagcaagataatggcaaacacaaaaatgtctctcactatgtcccagcactattccaagtgctatagcaatattaagacattagatcattagaacaaactccaccaaaaggccaacattttaccatgagtagccattgttagtacccaagaactagttctttagacataccaactttaactagggtattgatagggctaattatcaccaatttgaagctgtccagttaaaacctagaacggtgggctgtttttgagatatgtatatgggtggaaaacatgatttactctccacagagacaccaataatcaatcagagccgtagttggtaacacagagcatcatgggagaatgtggaaaagagacacaggctgcctttgaaaattaagtgggagagtagtgaacaggtatgttttctttttctttgtgacatggtctcactgtcacccaggctggagtgcattggtatgatctcggctcactgcagcctctttctcccaggctcaagtgattctcctgcctcagcctcctgagtagttgggattacaggtgtgcaccaccatgcctggctaagttttgtgttttttgtaaagatgaggtttcaccatgttgcatgttggacaggctggtcctgaactcctgagctcaagtgattagcccgactcggcctcccaaactactgagatgacaggcgtgagccattgcacctggccaacggtaagttttcaatgaggagacacgtgctattcaaacttagtcccatatttagttgtgcgaagagaagtaaatataaagccttcacaagaaaagcaccaaggcacatggtttatcctggctctggttggctccagtttcacccaccctccatccctgcaacaaatatttattgatggccaactgagagtgggcagtatcctcagttccaaaactacaaaggctgaatgcagttgcacataggcaatgggtactgaaaccatcaattacacaaagttataaagtacgtatgggaactcacaaacaggatatttaggagaaggaggtggtgggaagctttcaagacagagaattgaatgttcataagtgtgacatattcagaaattaatttttaaagtaaatttcctcaaatctaatctaaattttaattctgaattcttcaagctgacccttgccaccattgataatagtgtgataaccataaatcccatatttctgatcattcccagttttgagtattctgtctctttgtcaagtcacatgtcccaattttagggctagaaaacatggtcatcacgttgattagaaatgcaatttacagaagatttccctttccgtctgcttctaagactatgcaagagtctcctttcacctcccacactcagcttctgctctcactaccaacagcacagcatgcacggcacggcacagcatggcacgggctgtcagtttcactgaaggtggaaattcctcaagaatgcctaattagaatgttttaaaaaataaattcagcttcttagacagtaagaggactaccttctaaaagattacatagcacagttattttaattccaaatgtaattgaaattccactcagaattgtcttcttgaatgacaagtcattctatttcaacaatgacattgactgattttaattatgacatggtttcctgtcagcctggtgcttgaacccgattttaaggaaaactcattcatctcgtgcttctgccagtgagtgagtgagtgagtgagtgagtgagtgcttcacgagaactggaggagcatgtttcctacgctttgagaaatacatgtgaccttttgaaaagtatatcaagttctgcattgtactagcagtctcaccgtgggtgaggcaatttcttgaaacttctgtttatttactcttacagtgagataggttcaatttttcttaacagagctattgttagggtgaaatgaagtagctgcttagccatgtatctgaatccaagatttttgctctttattgacaccataatgcctcaatcttaaggttgatgggcactaaagtgcttaacttcagaagtggagaactccatatttcctgagcccaggaacaaatgcactaaatccttcgtcaaaaagtacctctaggtctgtcctcctgccccaaagtgatgaaagatgcatttagcagggctctacatccttggttcagtcctcctacaggctcctgattcgaaagctcaccaagtgatgcctcattaaaaccactttattttagctggaagtggaggggagggggaaatgaggaatgaggaagcaatgaacacagaatgatgtgaagagggatgctgcctcagcagggaccggcatccagccccacaggtgctgtgctgtggagtcggctccagcatctactcctttctgtgctatgtaagtggagaattacacatctcttcagagttggaatatcttctcctctctgccccttcaaactcagtgtcatctttggaaatagcagctcacaccactactgctgttcagagactgtcagtggctgcctgcctcctaggttttagagaaatcattctttttttttttttttttttgagatggggtcttgctctgtcacccaggctggagtgcagtggcatgatctcggcccactgcaacccccacctcccggttcaagtgattctcctgtgagtagctgggattacaggcacctgccaccatgtccagctaatttttgtattttttgtagcgatgaggcttcaccaggttggccaggctagtctcgaacttcggacctcaggtcatccacccgcctcggcctcccaaagtgctgagattacaggcgtgagccaccacgcctgaccaagaaattattcttaacattttgtagttcagatattcttttgataatctaggggaacctaggatcctctcacccagaaaaatgtagacacatacacacacacacacacacacacacacacacacacacacacacccttttattctagttccatgctctaaaacttgtccacaaactccagactgaacaacttgctcaggaagatcagaactcaaacttcttatcctgcgtgtcaaagctctctgtaatctcaccattcatcacccaagacttgaccatttctgagatcccagtggaaagcatccactctgataattatctctgatcattccaggcaacttatcctagtatctacactctggttacgttccacctccccgagaaccccagtgcaccaaccctatgagtttcccgcctgtcagcaccactccccacaactgctttcccccccagcagcctggaggccagaacccaccagtgcaaatgtcccttcatattctgccttcatcccctgctcctctattctccccctgtacacatgcctggcaatacaccagtctgtttacattcaaccctctaactacattatgtccgcttcaaagcacgaaagcaacaaagaaaaaggatgcaaatgtgctgatgggtctcacttttaaagacatcactacgcggctcaatcagtatttaaaactgcctggtgattctaacagatttcccgataaatactcctgttctctctcctaaaggaatactcagtgcctttttatcttttgttcagccctttaacctctgcgccctggccatatgttgatggtcttgctatatactttaagaaaatagaagtattctgacaaaaattactttatttttcaccctgaatgcaccattttacctaaatttctctcctctctcattttattgaactgtccatccttctctcatcagacaaactgacccattgtcaacagtgtattttacctcttccattcctcaacaaattcttccgtgcaattgttcctaatatcccactggatcatcagtttccttctcttcactggaatagttccatcagcattcaaatatgctgtaatacttccaccttaaccaaaaaacagtgtgttctttggcccacgtccctctctgactgctgctctatttctcccttctccttcccaggaacagttctccaaagaggtatctgcacttcctgtctcaactttcttttttttttgagatggagttgcactcttgttgcccaggctggagtgcgatggcgcgacctcggctcaccgcaacctctgcctcccaggttcaagcgattctcctgcctcagcctccctagtagctgggattacaggcacgtgccaccacgcctggctaattttgtatttttagtagacagggtttctcctaaagttggtcaggctggtctcgaactcccaacctcacgtgatctgcccgcctcggcctcccaaagtgctgggattacaggcatgagctaccacgcctggcctgtctcaactttcttaacgcccatccactgtctccagaatcaactccagaaagcccttcatccccatgcccccagtgaaaccattctcatcatagtcaccaacactctccaccttgtcaaatccagatgtctgtccagagttctcttcttacttgacctcttggtagcatttgacccagatgagccgcaccctcttgaagcgtttctttgcttttcttctaagacgccacacagcctctgggctgacctcctacatcagtggccatttctgttttctctgtctcttcagagaatgtaggcatgcttcagaactggtccatggccttcccacctcaccctcctctctcctttggtgatctcagaaggttccatggcttaagtactgtctaaacactgatagctcccaaacatatatctccaggaccaatctttcacttgatctccaaactagtatggtcaacagcccagttaccacttgcaggatcccaaatggcacacggcctagacagaattactgatttattaaactccttcctcataaatgtgcttttccctttttacccttattccccatacatgaagaaccattctacatattcttcaaccatcatacattgcaatcctgttgcagctcaccacctccccagccatgacctctgactgctcctgtccaagcccccctcatctctcactggacttgcattccgctccacaccagctttcctgctttgtcattctctggcttaatatcctctaatagcttctcagcatataaagaataaaatccaaactgattgccagggtcttcactgcccttcagactctgaccccacctacttctttgacataatcttactcttctccacccaagctggctacaccaacttgttccagcctaggtacttttatctttgctgttgcctctacagagcagtctcccccaggttttctcatcgctgcaaaatgtgtgcaaaacatcattcaggagtctgttcctgtttttctttgaggagtcctatattgccctatctaaaaatattgcaccctttattctctaacccagtggttttcagtcaggagagacttttgcctccctaggggcatttagcaatggatagagacatttttggtggtcgttactgggagttgctactggcatctagtgagtagaggctagggatgctacaatgcactggacagctgcccacataaaagaattatcagggtcccacaaatgtcagtaggattaaggttgaaaaaccatgccattcgtctacttcgttattatcacagcacttatctgcatcatcataataataattaacatgtatttcagacttaccacgtgccggacaccattctaaagtttttacatttatttcctctttaatcctcatgttccaaccatataaaatgggtcctattattacacagatgggacattaaggcaggaaaaggttaactgtcttgctccagatcaagttggagagctagaatttgaatgtagatggtctggctctaaagcctttacctttaaccattgcattagagggccatgaggttacatttttttcctatattatctgtcttttcccactaatatactatctccatgagaacatggaaataatatacttgtttatctctggatcctctctgtctagacatataggaggccctcaaaaatcttgaacgaatgaagagttctgcatacctttccagcattgcttcttataatctcacacaaagctgacttcccgggaaatgacctgctttctatcctggagacattccagtttcttgctttccctctgattcagcccacactctctcaggtccagtttttcctcctcactcctgtactcaacacgagtatgattgcacccatttctccagccccgcctccaatcttgcataacacatttcagacccatagatccacagagtcattttggtggaaagaacgttagagattacagctttcaaattatttattttacatgtaagaaaagtaagacttggatggctgggcacggtggctcacacctgtaatctcagtactttgggaggccaaggtgggcagtttgtctgaggtgaggagatcgagaccagcctggccaatgtggtgaaaccccatctctactaaaaatacaaaaatttgccaggtgtggttgtgcacgcctgtaattccagctactcgggagtctgaggcaggagaatcacttgaacccaggaggcagaggttgcagtgagccaagatcatgccactgcactccagctggggtgacagagccagattccatttaaaacaaaaaacaaaaaactaagacttggagaaactaagcaagatactgatgaaaattccagtttttcttccttctgtttggaattttcatgtaactctgaaatgcttctgggaagaaagaatttgtagaagctcttagggcaacaggccccccatagcccacttaggaaagcactttttgcagtcctcaaatcgaacaggaccttcatttagatgactacatttccctaggtttatattttctttttttttttgagttggaacctcactttgtcactcagtctggagtgcagtggtgtgatcttggctcactgcaacctctgcctcccgggttcgagtgattctcctgcctcagcctcctgagtagctgggattacaggtgcccaccaccatgcccagctgacttttgtatttttagtagagctggggtttcaccatgttggtcaggctggtcttgaactcctgacctcgtgatccacccgcctcggcctcccaaagtgctgggattataggcatgagccaccgcgcatggccccatattttctttactcttgcccctcagtacaatgtgtctccatgctcttattagaacaatttccacctttgccccttattttatctccaccccaaaatcagaactatggttcttgcctttaaggagtttacaatgtagatagggaaagagatcatgtatgtcttatattagatcttccattactttgcagactggttcataatctgatagaattactggaaaaacaagtgacagctttctctccaacttgttctacttgtttctgagagtgtgactgaaaaaaatgtggtttacacccagatgatgaactgacagttgtatatttaataattaggatatgagaaaataaattccacagataatctgtttgatatcatctatattttctttaatgaaggtggtttaatgcaacaataatttttagaaggcttatgacatttttcctgatgaaacagatttggattaatggtgcttctaggagaaataatttcctcatagatcacgttcaaacacattcagaaaagagatattcaggaaagatcccttgggtggcttaaggccatttcaacctacgaacctagtagttatggacaaataggatattccacatagtaacaaattaccacccctcagattacctaatgattgtaaaagggaaaacttttctttttggaaagatctggcagtcaccaccttaaccaaaaaatcaactgcagcatcactgaattctgatgtcatgaaattgtgtgcctccagatgtgatggcatagaaacatcatctacgacatattcttgccaaaaacatacaaatggtacctactcaagctgtaagaagtaatttctagttaataggaaccaaagggaacatcattacaataaagcaatcacacaaatcctcactgtgggacgttttacaagacaattggcctgttctcttcacaaagtcaatgtcacagggaaaaatagcagggggaatatattagattaatagagatgaaattcctgagcctccagtataacctggttgaagaacaaaagaataaaataatttaaaaagaacaattgaaaaagactaaaagtgaaatggacgttaggttatattagaaaactattaattttcttagttgtattataaaattgaggccatgtaatacaatgcccttactcttggggtctcctgtttctaggagtgaagtacgtcatgatgcctacaatttattttcaaatgcttcttcaaaacacatgcccgtgaggacctagcagtacagcaacatgttaataattaaatccagctagtgggtatttgatgtactattctttcaatcattctgtttgtttaaatgttgaaggtaaaaatgttgaaacgaagctaatggtagtgcttcagaaagttacttagcaaagctatgtcctacttacatttgtcattctgcactccttattaggaaactattttattaaatctcctgtaatataactgatcatatatgcttcacacaggaaagccctcatacggaaagccaaacgcttatatagccaactactttttcttaaatcttctgcaaattctaagtaagtgactggcaagaaatgctttcggggccccaaatagagatgagaagcacccacttaaagccactgtgtggccactagcctgggcctagtttccaaattgacactttcattgacatcaatgtgatgtcagccacatcacttaaatacttacatagattgagtctcaatgtcagttcatttccagagatcagaactgtgtaacatgtcagttctaacaaatgagaccagatatgaatttacacaatatagtcaatctagagactataaagacacaacacatctaaaatttggatctgaaatgcatagtgcagaaatcacacagcccttttgatgcattgacacttttcaaactacagagaagctgaaatgtggcactaagtcattataaatatttaacaggaaaatgctggcataactaaaagagttcaggaacatacatatatccatgaagcttcattgcagatactcatgagacaagcgcctcaagtgactttacatcctggaaaatgaagacaagtataaagaaatatgattctgtgaaagtcatttgtaggacactccatattacggtgtgtcccacaatcataaaacaatgagcttttctctgcaatcccatggcacaggtaagtgcaagattagcatcgctaccaacagccgaaatatttggggtcaaaccctgttacaaaaccactctgtcactgaatttctccaatgcagcagccaacaatttataggaaaaagaacactaatatcaagcctttaaagggtgctccaaacataaaatcatgagtgctctaggaacttttggagcttatgaatcacactatgcaacgtgctcatatatgccaatgcccgccacgttttactcaagttggtgttgatttggagatgggccctgaacattaagtagaatatagaccatcagcagttactaagctaaatgcattgtgatagcttggaagtttagtccacctatttgattctgtcaacttgttgatacagtaaccattgcaatgacaagttgaccattttgagaagtttatgaaccccatcagctctctcctgagagaataatgttgaataaatgaagaaaccaaaccaaatatttggacagcattatcaacaaataaaaggtataacatatgacttagcaaattttttagctatgtctttaaatttttgactgaggttaggtcaagggtaggcacatttaataggcaacatttcataacaagaatgaaaaatgatgatgattcaaatcccaagttatttcccgatcattgcacaattttggtaaacctttaggaagaaaatttgatttcatctacagatcctcttctagtgttccactgattatattactataggaaatatatgttctttgcccttttcattttagaaattcttgtttttgtcattattcactcaacaaacatttctcgagaatcaggcaaacataaattaaaaatggttgacatgttagaaacacaaacaggtgctgaatgagcagagaggacagatatctgatccatgctggctaagtgtgtgagcaggggcttgctgtgagatgtgccatgtgcccggaaatggagggcttcgggccggagtaagaagtgactgatgggatggaggggtagggaatgatgttccaggaagaagcagcagcagtcagaaaggcaagggtggtggaaaagaaccatgtgtttggcagcttcatggcaatggggcagaggctgttgggagctcgcatgttgacagatggtcaagactttgtaatccatgagcaaagctggaccttcttctgagaataaagggctatctttaaaaagtttaagaaagttactaacatgaggaagtgatccttttggggttgataggtgtgatgattgggtttctatgcatgtgtgtgacatgtgtctccctcaaagcttgttaccacatccgtacagcacccataggatgttgggggggtgggtggggaaggaaaaacaagaagaaaaggaaaaagagaacatgagtagatgtgtgttttcgaaagtcaactctggcaagtatgtagaagttggaggaggcaggcctagaaacctatcacaaggttattgccataattggaacaaaaaaatgtgagtgtgagcgaaggcaatggtgagaatagaagaaacagggatgggttggaaagagcaacaagcctacaaatatgttttgtaagtttagcatctgtaagaacctgaaaatggatgaagcttaaaacttgagatgagagttagacatagatatgaattccagaaaaatcaatatatgacatttcttgcccatttacatctccaaatatcttttctttgtagtgttctaatcaaaacatcagcaaaggaaatacaaagcaaagtaaacaaacaaacatccttccatctcctcatccaccctgcttctcctctaaatgatgaactcattcttttcaaaatatattaatggaataaattcaacacttaatgtacatctgaacctaattttgtaaataagacatattttacagcacatatctttcaattaaagtgccaaataagacaataaaaccttcggttggctttttatttcattgaacagataaaaatacttaattaaataaaatgcaaaatgatgacctgtcagattgctccctgactccagaaatcatctttcatccctgactatgtgtgccagggtcatacaaccaaacctctccctggggtgtaccccaacagatgggtacctggcccatgacttagtgttctcacctcctcccatcaatttctactccattccccaacaattacatatccagggtaaaatcggatcaaggaaaaaggaggatttgtgtctccgcagttcatggccctggcatttatagctttccccctttcagttttcttgaattccttctccatcctctccctaccccttatccaggaaaagtgcaacctgtgcatgtggttggtcttcagtgtccacagcaatctcgctgccacagtaatggcactcttatgggatctgtactatagtcagggaaatctcacaatcctcaatgagtttagcagggaacggaagcctgtttcttctcatattttaatttcctgggctttgcatttcttgattttcctctagtttcaaactttggaggtgatgtgaggtcttttcttcctaggttaattcacttttttttctagcccaaaccatctcctacagtatctttagagggacagaactgcagagtcttaaagggcaaaagtgaggcaaacctgggttccaacccaaccttccaattgccagctctgtggtcttacactagtctggctacagttcggtcatctcacctacacaatagggattacaaaatctcttttttcttgggttttttttttctttttgagatggagtttcgctcttgttgcccaggctggagtgcaatggtgtggtctagcttactgcaacctccgcctcctgggctcaagtgattctcctgtctcagccttccaagtagctggaattacaggtgcatgtcaccacacccaggtaatttttgtatttttagcagagacgaggtttcaccaggttggccaggctggtctcgaactcctgacctcaggtgatctgcctgcctcagcctctcaaagtgctgggattacaggcgtgagccactacgccccgccctcttgagattttttaaaggaagttcaaatgagtcaattcatgtaatgtgcttagcatggaacccggcactaaggaagtgctaatcaaatatattatgaattcttaaagaggccggttctttttttaatgtatttttgttgttgttgttgttttccatctaggctactctggctcgtttctgtaggaagtgaagcccattcttagtgcatcctagactcttccttcaggaatcctctgatgcagcttctctctgttcttagtttcctatcaggccatctagcttacctgaatctctccaatctgcagcagaccatcctggtttaagcttggtttaccttgtttttatttatttgtttacatagcatcttttcaggcatttctgggctttgttataattcccttcctaaaatattggccatctcaggaaacagtttcacctcccctaatatacattagccctcccaattttcttctatccatctatctttctgttcattcatccattcaagctatgataatcactggtttccacactccagtagttcataaatgtaatggggaagacagtacattgtgattaggagagtaatgaatttcaatttttttttttttttttttttttttgagatagagtcttgctccattgcccaggctggagtgcagtggcacagtcttggcttactgcaacctctgcctcctgggttcaagcaattctcctgcctcagcctcccaagtagctgggattacaggtgtccgccaccactcctggctaatttttgtatttttagtagagacagggtttcatcatgttggccagactggtcttgaactcctgaactcaggtgatccacccgcctcggcctcccaaagtgctgggattacaagtgtgagccaccacgccaggctatgaatttcaaaatattaaattgttatttttttcttttgtacttcattttaattaaaaacattacatttctttttctcgtaaggtgaaaggtgatcaatattaaattagataaaatgtttaaaacacctaaaagagctcctggcacatagaaaggattatcaaatgtttgaagagttattaaaaggtataaagaattatcaccgagaagaaacaggtgctctttatctatgtgttcaatgatgcacaagaaatttccaggaaacaggaggggggttggggagagatgctgtattccatactgaggaaacagcacatataatggcaaacattgaggaatgcagactaaaccacatgtgatgtttgagaactccaagtacggctagagaataaaattgcaggaggaagcagtgggctgggaggagcaggaggctgctatggtaggcaggtgtcagagaatgaaagtctctttggtggtacacccagtattgaatctggactggacccgagcagaaataattgtttccaactttgtcagtgtctactccgaaacagatggcatcttagatacctgacattcattatcctatttaaacctcaagtaaaatgcaacatagatagatatcatcccacttcattcacataaaaatcaagtcatcaactaccaaaatggtgcagtcggggttttaactaaagtccacgtgattgcaaccacactttggaagagattagactaagggggcggggggcagagtgaggagtggccctctgacatgttttaagggaaggaataatgttaaaaaattgaattttaacaatcataactgtgcagcagtgtggataatagatgaaagaaggaagagtcttacaagcagaaaagcccattaaaacgtaaagcagttgtctggtgagagatgcaggagtctaaacaaacacagtgtgaaattcaaagaaaatgctgaatctgagacctatttgggaactataactgacaacaatagcatcctcacaatgctcactgacttttcatcatgcgaaactcaagtaatcaagggtccagcagctcaccataataactggatgccaagaagaggggaagagaagaacaaagagtttttgctacaactggtaactgatcctatcaagaatattttgaggccagacacagtggctcacggccataatcccagcactttgggaggccaaggcgggcggatcatgaggtcaggagttcgaaaccagcctggccaccatggtgaaaccccatctctactaaaaatacaaaaattagctgggcatggtgacaggcacctgtaatcccagttactagaaaggctgaggcaggagaatcgtttgaacccaggaggcggaggttgcagcgagccgagattgtgccattgcactccaccctgggcaacgagcaagactgtctcaaaaaaaaaaaaagaatactttgagaatgaatttgtaaagtaacattgggctacagctcaacactgaatcaatttttgatagtgaattaggaagtaatcccagacctgaagaacataatggaattagaggcagatgaagtataaaatctcagagaggctgtagtctagggagaagatcatggtttggccacagttaatggaaaaagagaccagagtgggttagagaacctctatattctgtgcaggttgagggtttggaggcaatttccagaagttacctcatagagattctttattcaaatatttccctagaattcaggtgtgcctgacggtgtggctcaggagtgatgaatgccccttccaggacttcagcaatgattttttaaaatgcatatttggagccttaacacaagaccaggctgtgaacaatattttaatttttaatacacatttggacttgttgagagtctctgttttaataatgttgcccttttttcctctaagaacaggctgaatattccttagagagacactttggaaatcgcactatggcctgcacggcggatatctgctcttttggggttgagggaaggagcttgaatgtctctaagagcagaataggaagggaatagggttcccagatggttccagaggatgctgaacgttcactgaatgaacccctataagtatttcccctgtgctgctggtaggaaaaataccgatagagtttaaagcaaggaaggatggatggaatgtaagatggattgattcacaggtcagaaaccagatgctactgcaagtgatccctcaatgacatcatactcaacaaaacaagacaaatgttcttggtacccttccagcgcttcattgtttttcattgcctgccttaacaggatttagaatcacacggtcccagctgttaacaggtatgtaccatcacgctaccacttcaggcacatcagggaaaacatacacttggcttcctttctcagtccatacaagcattttgaacagacatgagaagagtttaagaaattgtggagggcgacacaggaccatgcctcccatgtctgacaaatggctgtgttctctgatgactagcgtgggatccatcaccctgcctcctaatccagggccttcctccagcccagctcactgcccgggtactgctgccctgtcatctctgcccttcatccctcttagaagccaatccccacttcccagtaggtggcagatacttctggtgtcctttgtacctttctcaacagccctccctgacattgcacattcaggattaggctcctgcactaatagatgacagtaacctgttattttctcagtgtggatctgtcagacttgcttgggcataaacacagttccctggtatcagcagtaccataaggtgccaggatccactgacctaagtttgctgagagatgctgaacaaaggtaaattttcctaatttgcagattgtattgtgaagtcaaattgagactattaatttggccacctttcccatcgggtaacttaggcagcttggtagctcagtgtgcatgcatcagtgagcttcttgggaaataaatcgggttagtgagttgaacaaatacttatgcaatattttctatgtgacaggcattttgctagccaggcaatcataaattagaagcccaactctattctttttttggaagaattccaatctggtaaaggaaacaaacaaccccaaaattgtaaaaagatggcagaatatcaaaagtggtagaagaaagttaaaatagcttcttttttttttttttgatagagtctcactctgtcgccaggctggagtgcagtggcaagatctcggctcactgcaaccttcacctcccaggttgaagccatcctcctgcctcagcctcccaagtagctgggatcacaggcgtgtgccaccacttctggctaatttttgttgtatttttagtagagacagggtttcaccatgttggccaggctggtctcgaactcctgacctcaagaaatccaccagcctcggcctcccaaagtgctaggattacaggtgtgagccaccaagcctggcaaaatagctttttatagtggcccttcacctccaggtgtttgcatttcagtgggattaaaggtggtactgaggcctgggccagtaggtagaggtcacctgagaacaccgggccctcccattgcccatgcctgggcaataccctgagtatttggtccttgagtagcatggaatcctctctagatttaatcactactaagccctaaaggtgggagtatatgggattcatttcgtctttgagaaaatcaaggcatgcagtgcagttcccttgaatagggagagtctggagggttgcacaaatctgaaaattattcctgctcagaggctgtatcgttctttgttgagatcaaagtccatcatgtatgccgacagcgttaattttgaagaaagccattcctcacattatctcctcacattttgcctcttcctggcaaaaaataaaaaatgttgttctgtcccttagatttgatttatttttcctctagtttattccccttcaaaccaataaacaaattcttcctacaaacagcatgagtcaccactcgtagcaaacatcctcacaggtggccgagaaaaagaaaatgtgtgtgtgtcacattcccattaaggttacagcctgagcttcgaacttcattttggcccacagcccacttgtaggtctctctgtgggcatttattaagttatgttggtctcttcaaatgtttcccaggccgggcgcggtggctcacgcctgtaatcccagcactgcaggaggctgaggcgggtggatcacctgaggtcaggagttcaagaccagcctggccaacatagtgaaaccccgtctctactaaaaatacaaaaatcagccaggtgcaggggcgcacgcctgaatcccagctactagggaggctgatgcaggagaattgcttgaacccgggaggtggagtttgcagtgagccgagattgcgccaccgcactccagcctgggtgacagaatgagactctgtctcaaaaaacacaaacaataataatcataataatatgtttcccagactccatgctctccagtcagcccttcctctctcactggcatcattttggtctggtatttccacccttcctttggaaaaatctctcttctactcagcattccccaacagcctccgtgctcagtcccaccaggacaccaaggtgggaccctgtgttaaagtgtacttcccaaggctatttgcatttgcataggcttcagagcattaaatccaaggcaatactctcaaaaggtagaagtctagatgtcagctgaaagatgaaagagactggcgagggtgaggacagagatgaagacgctaataagggcctttctgttgctggctccgtagccaggcccctcttctcaggagtaatcatgtcaactccatcatccccagtgaggtgggaatcgattttatcacacctttataattacacccttcttatatttacatgaactgcttataattatgtggatttcttgcaactctcataagctgcccaagtagggccaatctccccggtgtgggcagggagtaggcgcagagctgggctttccatcacacctgtgtgtgtccaaggccaaccttggtccattatctcatgcctggaggacatcccggagggagacgtcctttcttttgctttaatccattccttaagttaactcatctcttgctgtcctgaatgttttattgatgctaactttatttttaaagattataatctgcctgttctttttattctttctttactagaaatagattttatatatctcaggtataaggacacttcttatcatccaagataccctccttctgtattctcttctgcaaaataataccccctctatagtcccgttgccattcatcaaggttgctaatggactccctgtgaccatctgattaatgggctaatacaccttctcaaaagcaatgccttttaaacatagaaataagtaagacaataatctcacatacatttaaaaaatcttatttttatcttacagttgatttttaaatcttaaaactttgaattttaattttgtattattttgatagtgaattatattacacataaatgctttttaaatattagatgtacatttccattttacttgcttatattttataaataaaattatgtacattgtaaatattttgagaaacaaaatcacaaagtgtatcaagctagcataattgatgttgtcacagaggcgaagtgtattttcactcaccagaccataattagtaaataaatgaatactgaatgaataaacgaagcgtctcttattgtttggcactcattattttcaaatgttggctattaaagatagataatgctaggctgggtgcagtggctcacacctgtaatcccagcactttgggaggctgaggcaggcggatcacgaggtcaggagttcgagacaagactggtcaacatggcaaaaccccaactctactaaaagtacaaaaattagcaggatgtggaggcaggtgcctgtaatcccagctactcaggaggctgaggcaggagaattgcttgaaccagataagtggcagtgagcagagaccttgccattgcattccagcctggccaacatgagtaaaactccatctcaaaaacaaacaaagaaacaaaaaaacagtaccaccgggctagcaatttagaaactataatcaatgccttaatatgtcccttcttttagaaaaataactacacaaagcatctgcatgacttataagagcttccacaaatataccataaaatgttagccctgataatttgctgtgacatttaacatttcaatgggccatgtttcttagagatcactaggaaatgaagcagagcactctttgcattcatttctgctccccgagaaaacactttctctccttcactcaagccaccattcataacccagtgatgtgtgatgtcacttgtcccacagaggataatgaacaacttcccgggaaatatttccatatgactaacaatttaatgtcttagacagaaactgaatcttgcctactgtatagaagaaacaactgtgttagttcaactgcatggtacatgatgaaagtccctgttatagctattccttctaacagataattgatggggccaagagacaaaagaaggaactcactctcagaaataaacgctccacaaagcaatctcatgcctcacctaatgcaatatgtttctcatgggtcttttgttactctaacatattaaattatccttccaattaccttggcaactgaaacaagagcgcctaacacgctgatgactttcggacgagcacaccagctgtcagttataaatgataattaaggcatcttaattattaagcacagtgaaaatatgcagtgttcattttttataaaacttgtgtcctaaggtagaagaatcctcataccaaccaaatgctctttctctacctttgatcagcaatttggccttttttctctctgaggctgataaattgcagcaacctttgagatactagaccctccacccccaccccaggtcttcccccaggtctccttagttataaaggtagcagaatgtgatggttgaaagctgcatttgtaaccagcttaccttcgcaacaatagcaagagtaacaaagaatccatcctaataaaagctctgtgcacagtcagcttaagcaacgtaaagtgttcctttattctgcttagtagcttctcccccagaggttaaccattttaaagctggcactcagcctgagaacaggaacaaagcattactagaaagcagggatcttcctccaggatcagcatctctgctttccgtaattcttaagaaatatagaaactcaatgaaaaggaagtgatacctttggatgggcacattccagcacaggaaaatcgctgtcttgtcggctgctgtgcagaatgagttgcttgggcaggtattcctctattctcagctcccgggtctgccttgtagccgcagccagcctagggagcatttacggcatgtacgtggtgttcatccacaataaaaggagactaaccagctcagcttggcgctgctcgcctggaggcatcagatccttggaccctccccatctgattggctgctacccggtctagccgaactcctctgccttaaccttctgctgcgttcaatacattttccctcgggatacagtcagagaagagctggttagggaatcagtggcaggttaaattgagctggctttaaaaatcagtgacatgattttctatgaagatgtctaatgtttaattttccaaagttctacgtaatccacaaggagagacgtaataaaatggatatgatttaacaggagcggcttcatgattcctccctgaaaatacctggagtttaatgcatgcctaacaccctactgaagtgatcaggtggctttttgcagcactgcgtgtctgtataatcaaccttaaatcaaaacagatggggatgacagaatatattaagaggcttattaaaagtgccaggagatgcagttgaataaggctgctgaagccatctcaagaaagtgttataaatcatttacacaaaatgctcttaagacagttatggttgattttagatagctctgataataaaaacataaagaccaatgacagacaaaaaggtaaagcctgacttagcatctctagaagacaagtaacagaaagaaaaatcaaatcttttactctacaaaagtagtgaaatgagaaaagaacaaaagtacaccttcatcatctcctgtccatgtactggattcaatttggtcaaggacctagaacagggtattgaaaagtccccaatggggttttggtttgttttgttctttctgtttttttttgttttttgttttttgttgttgtttctttgttttgagaccgagttttgctctgttgcccaggctggagtgcagtggcgtgatctccacgcactaccccctccacctcccaggttcaagcagttctcctgcctcagcctcccgagcagctgggatcacaggcacctgccaccacacccagctaatttttgtatttttagtagagatggggtttcactatgttggccaggctggtctcgaactcctgacctcaggtgatccgcctgcctcaacctcccaaaatgctgggattacaggcgtgagccaccacacccagacagttttgttttgttttgttttgtttttaaaaatgagaggcatcaaatggaagatagtgaattgaccacatacatttaaccctttctccctcacaaagccccactaaaatgacaataaagcttttattttaagaaccataaacccacaaggacaaagaaataggagaaaacagcaacccaatttagaaaaagaaagcagatgggtgagtggtagctggacagagagagctggatcccaaatgagcaatgaggagagtcaagaagcagcagcatttccaagccagcagccccaatatgctctggaattggcagagatgaaattggggctaaaaacagcaggtggcctgactgcccatcattcaccctgcagaacacagaaggcttattctctggagagactaacagagggcttctggactggcatggctgggaataaaggtaccaaactaaaaatattgctgttaatcagaaacagatataaaaaccctgggccttctttccccactcaactcctgggagccaggtagcaaggtgaataggctccagaaaaaaagatgtgaagagcgctcttcagggatcccaccatcccaaaatataagacgtaaaggcatcactacagggtactctctaagatatggctgggctagatctcccagaagttcaggccacattaataagctctacacatgaattttggtgcccctctcttac

SEQ ID NO: 573 - DNA, 553190 bp, Homo sapiens
  source 1..553190: mol_type = genomic DNA
ttttcctcatctcccctcccctccacccttcactgaccccactctgttcttctctgcttcctgtgtgagaccagatgttcccacagctgcagagtcctcccttccctcttcccattgggtttgaagctgacaggttcaggatttacatggtggggtgagagggaacggcacattcggagtgtggggccttcttaggcatctggccagacctcctcctccccaagtcccagcgctgggtacagcgtgaatgcaggtagcctgtgcccagtgctttgggatatgatttcctggggagggagatgggtgctccaattctctgggagccagagggaacccccaattctccatctttcccaaatgttcgaggccttgcccctctgccccagtaggctctctctggagccaagggacccagctgggaggtggggtatgactgggaccccggcccaagggctcctatctggcgcggggcctctgggggaaggccatgggcagggtggccctggcctggcagaggctctgaccctggccttgcctcgggaagcgcctgccgtgcttgttcctggaggcccgtctgacactcagggtggctgctctgtgaagtcatttttatcgctactgaactaaagtggccacgagaccttgggtggggacttgctgtgctccgagcctcagtttccacattcctcactgcgcctgccaggtccctaggacctcaccccctgccccctccccacgcctccccacacaggagcttgtcctgttcagggtagctccctcgtggcccctgggttgggagatgaagccactgcacgtcccgatgtctgagccagaggcctggcagtccttggggcagttctgctgaggacaccttaggggcctctgcactgcacccccccaccccgctccggccgcctagcaggcctccccagggaccttcacgggcttcaccccctctccactgccacctcttcagaggccccttgaggagaaccctttataatctgcgccgggagccctggttctagctcagagttcttttgcctatatatgtgtcctcctgggttggtctgtctccctcaggctgtcagctcccggacagggacctggctgttcccagcgggagcccagagccgcagaaccgtggctggacctggagagagggagggaggacgggaagaggtgggagagccgggaaggaggaccggaggaaccaccgagctgggaaggggatcctggcctggaggtggggccgcgctcgggtacgccgggcttcccacgagcgcctgggcggcgggccggccggcaggtggcggtgcgcgctcggcgtcgcgggtggcgccggggccgccgagtcccctcctcccgccgctccctcccctcgccggctcctttctctgcgctctcgctcgcgctccccagcgccctcctgctctcccggccgcggtcccctcgtccgcgccgccccgccgccggctccgctgccgcccctggcgaccatggcgcaccgggggccctcgcgcgcctcgaagggccccggccccaccgcccgagccccgagccccggggctccgccgccgccgcgctcgccgcgctcgcggccgctcctgctgctgctgctgctgctgggcgcctgcggggcggcggggcgctcccctgagcccgggcgcctgggtcctcacgcccaactgacccgggtgccgcggagccctcccgcggggcgcgcggagcccggtggcggcgaggaccggcaggcgcgcggcacggagccaggcgccccgggtccgagtcccggtcccgctcctggtcccggcgaggacggcgcccccgccgcgggctaccggcgctgggagcgggcggcgccgctggccggagtggcttcgcgggcgcaggtctcgctcatcagcacgtcgttcgtgctcaagggggacgcgacgcacaaccaggcgatggtgcactggacgggcgagaacagcagcgtaagtgacctccacgcgctcgccgcggcccctacccgggacaccgcgggacacccgggcgggaccgccacggcccccaccccagatccccactatggtcatcaggggcgggttcttggcgacttgggcacttgggtcacctcggccgcgcccctactggcctctggtcactggttacttggggagaggtcctcagattcgtacgcttgtctcaccgcaggggacattcccgcagatttcgggatcctgggccacctccgatactcccccactggcctccaggtcttgggttacggaggaggaccccagaaccttcggaagcctgcaggtccttgagggtaccccagctcggcgttacctcccctgcccccagactccaccagctgagcgtcgcgttctgggattttgggctccgggatccttccctccctggtctaccagggactccgcggtggcgcctccgcaggctccgggacttccccggtcagctcgaatcctgttctgggactctgggatttctgggttacccctctccccggggtactctagtgcgacccgcggctgtcttgagctcttgctgccggtcgccccgcctggatgcactgggacccgcgtacccccttgggttcatacccacactgtgctggagacctgtgtggcgctggcacagcaaactccctgccctccccccaccttcccggctactctggctttgctccagctggaagtttgccacctctgttggggacctcctgttcctccacccacagcctggggctcccacccttcccaaatcctgcctcctctggcctttggtggtgcatgcaggaggcagagggtccctttagattattcccctgggggctgcctcaacctcactccccacttccccccacccccacaaaagggccaagggccactctgaagtcaccctggggcagcccctggtggggctctagttttgcaggttccagagaaggattgggatagggaggtggcagccatgaatccccagaggagggtacatttgtatggggaggggagatggaagcctcccctcatttctgtgccttgctgtctcctggggtcccctaggagacctcttctcgcttcccaaagggccagggttcctatatgcactggcagtggcatgggtggggagcactggcctctggagccaggaaagggcataatctgggtggtcacttgtgcccatctcctctgtccagctttgctgggctactcccagccagctgtgatttgtgctggaggagggatgaggtgggcagatgaatatgttggggcaggggtaggggcagcactgaatgaatttagtcggcctagagcccagctccccaaccagccagcatctatcagggtacaggtgccaagtgtctggtcttgggtcattcctggcatctccagcctgactagcagcccttggaggggagagctggctccctgggtgcagtgggccagcagggggcagtcagggtgccggctggggtgacttgcagaggtggcaggtgccacctccctagaagagccctagaagagttctctccatctgcaccttgagagaggggtcagatgccaggtacttgtgaacaaacggtgtgtgctctaccataagctctaactcaggtggaaaggcaacccagaaactgagagctcaaaggaccacataaatacaaaaagcaaatcccgcagggccagaaagctctaatcccctaccccatctgccgaggtggttgatcctgaagcttgctcctgcccctttgtcatttagcttcctggggagggggtagaggagccccatgtgaggggataggctgacatccagcctgcccctgtcctgacctcacagtctgggtgcagggcagcttcctgggagagagttgaggagggagcttgggccagcagggatggggcactgggggtggggggctgtcagaggagcccatgtggctttgctccttgagggcggcagctgggttgggtgactcctctgtgactgggtgggcttgcgtcctcactgctggcaggtgtgtgtgtgtgtgtgtgtgtgtgttgtggggggaggattgtgggtgggggccaatgttggcttctctttagtgaggacagcaagtccaaggaaccagagaggagctttaagggatggatgtcctctggtcagcatgaggcgaggggcaggggtgaggtgtggcacaccgggcatagcctgacacttagcaaacactcggggagtagaagccaggacaccctcattgtgagtagtgggtgtgggtgtccgtggggtcagatgctggaccaggcattgggcttcaacaccttccactcctgcctctctcacacacccattctctggactgggcagtcagggaagacctgatcatcctgaacctcagggagcaggcgaggctgcaggagtttgaccttgcctgagaaaactcagaagaggcaagaaggctgttatcttgagctaactaagtaaaactgctttaaaagaaaaaatcattgccttagtgcttgttgcatgcgtagtattgttttctcagcacacgccgtgtcttagaaatgtactctgctccctctagtctcatcttgcaaccacaggactaaagatttcagccaggatttggcagtgggtttcacgtctgcttgaaagcaccatctttgaaagctacaaccagacagaaactcacacggctggtttgctgagcagtcttcttaacgttttctttcctcaacttgcttgccgccctctgcagatgtggtcaacatgaacagagagcgtgtttactttaccatatcaggtgttcttcaaaattaaaaggagcatttgatgagggagatggactttaaaacatggcttttgagagcatcccacaagaagcagtcccaggatttaagccctcattgctacagctccgtttaacattatgtgggttttccttccaacggcttggttctgcctgctcccatggagatagagaaggggacttgcttggaagttcaaacaccgcctccctgtctgacgtttagctgtagaaacaaattgttatgtgtgaaattaatgtttcattgaaaccaagaggtattgcgtttttatggatctagagtgggctgtgcacacacagctctgggttttgcatctccggagctgcccttggaggcagcggtgctatttgaaggtggataaatattacagagtgtggctctcagcctctggggttgcggtttcatgttattcctatggggaatgtgctgtgccccgtcctgttcttaatgtttctgggaaatcgtgggcttattgtgcttattttaagcacagctcacctgggctccttcccacaaggcacttgatcctcaactttgaagctgaatgtatcatttgacttgaacgtgagcttcctgcagcctggtccagtttgttcacctctgtcattgttccccgagaagatcagcacctccctcccctgccctcccttcccctcccctcccccttccctctccctcccctccctctgcccattttccaaatctgctctgtgctgcgcctacatggttagtggtatccaaggcagttgaatgcagaggtgattctgagcagactacccacactctctgttctgcaatcttgatgaacccgatatttgtgtatattttatacccagagagctagagctacacatcagaagagcttctgaaacttgtttctctgagttaagaggtcaagaactaatggtatgtggcagcttctactatactacccatggcctctccccaagtttgcgtgagaattccatcatgacatctgccaggtgtcgagttcctggagggcaggtgaattctctttctagggctgccagggcaaagtgccacagactatgtggctgaagcaacagaaatgtattttcttgcagtcctggaagctggaagtcagagatcaaggtattgtccaggttgattccttctgcggcctctctcctgggctcgcagatgccaccttctcccatgtctccacatggtcttccctctgtgtgtgtctgtgtcctcatctccatttcttgtaagggcaccagtcatattggatcagggcttattctaaccacctcattttaacttagttacctctttaaaggccctgcttccaaatacagtcacattttgaagtgctaaggacttcaacgtatggattttggtggggggacacagttcagaccctaatagcagggaaggggtctcagcttcctttgcatctcctgagtttagaagtggatcttagagtagtctagtgggagacagcagatggacatgaacagctaggatatgagggggcaagtgtcaccctcccccgataatgctgatggggaaatcagggaagactgcatggaagagggcatcaaggctgacctaaagaatgagtaggtggagtgtataggagatggagaacattccagaaaacaacattccaacttgagcaaggtctggggggtaggaattttgaaggtatgtgtgtgttatataaagtgagagtgaatgcattgtgcatggagacaaaccatagaaaagaagtttggaaaaaatagattaaaaagtcagctcccgatggaccccagatgtgaggctgaagagtccgtgtcgcagtgacgagtggtggacattgcaattgagcttcagaggcagcctgcccgggtctgtatcctggccctgccactctctggctctgggatccaggtcaaatggactaaattctctggacttcagtgaccatatcttgaaaatgggagaagtaaaggctcataggtttgtggtgcaggtgaagtgagatcttccatgtcaaatgctcagatcagagcctggcccacagcaggagctcagagaatgatatcaagaaacagccctggaggcactgtgggggatggggctggtgagggctgcagggtgagacatctggacagaggctcagggaggagctgctgccagagggaggcttggaccaaggctgtggagggggctgagggagaggagagtgggctggagagaggtgcgtggctgggcgcacaggacgtggctgccccggctctgcaggcctctctgtcctgggtggtgctgggcttctaggctccaggccagcctccagagtgcagagaccatgtgagttcttaaatgaacgggttcaaatccacgacaaagctgacttgaagcctcgtgtccgatgcttgtggttttgtgatgtcaactccagtccaccttagaggacagcttggtggctccaagcttggggttttgtatttaagtatgctgaacttgctgtgcgttactctggaattctaggcccacatggtgtgggcctcccagcatttggggtggaggctggattggagcctgaggtgtggcccccggtggctgagctgtggctggtcggcctgtgagtgctgggcctccgtccagaggaagtgcatctctgtcgtgatagctcatcaccaagggtgtccagcggccacctggagagagacagaagcaggcagaggtcaagggatgtggtgaccaggggtgagtgcctgtcatacttgctgtcaggagctggctgctggtggggcaagcctgtccgggaccctgggcctggcagctggatgaagaaccatgagggagccggggactctgtgtggagagaggcggcagcacatggggacatgcagagggcgggctgagtctagggaagtctcggcgtgcaaaccacaggctcgcacggtgacccagggcttctgcccttgccccagtcactcgacactcagagcatgggttgagagctcccagcaggaaggggagggtgttgtgcccagaaccctccacgtggcctcatatttgcctccaaagcagccggcaggccttgtttcctgggtgcttacccatggggtctgctgggtgcactttgcggaagtccccatccttctgattctcctgtgagccgggaggatggggagccgtgctctctctcgacctgggccctagtttcgtcatcgtgtttcgggtgtcagccctggggtgcagaggaagggcctggagccagtgggatgggctccttctcttgaagtgcttgtggtccaaagcggggtgggggcagagagccccagggatgcaattcaggaggagcgaagtggggccggtgtggaggcacagtgcagggagagcaaggtggggcaggggaagctcagttcacctggggagggggtcacatgggccacaggtggaggaggatgaggatgactggcaaggctggggaggtgtggctgaggggagcagcagagatctctgaggtgtagagggcaggtgagcctggtggaggggctgcccgtggccattgcctgtgctgtgaagcaggggctccctgagcagggctcctgcccatggtgtttcctggctggggtccgagggaggctgttgctgtggtctggccttcacagactcactctgtggcctgggtggggcgggccgctctgggatggggagctgcgtagacccgcttccctggcctgggtggggcgggccattctgggaaggcagaatacaaactctgccttcgtttgtattctcatccaagttcaacagatgagaccttgactgtggatcccccatgttctgtcctctctctgcaccccctcaagtgctggtctgttcctgttgcctctgaggacccctgagaagctcccaaacccactctcccactccccaaaatcagttcacctgacctaaggtgccctgccttgctgggtccttgcctgagggaccgacactcccggggaatgcgagcaggaggggttatgggatagaaactggctttgggctggaagtccacccctctggtgcacagtggggaagcgcagaggtgggggaggctggattgtcttcggttgccccgcgtgcagggcagcagcgtggatgggctctcgtgctgctctggaggccctgatcccccctcgctggaagtgctcaaaaggaggctccatgtccatgctccaggccactgcagggactttcggtttggggtgggaagcgggaccaccaggggccgactgaggggtccagagttgtggttgtgagcccagattcccagccggacccaggggtgcactccatgctgttccacatggcctctggctctgaccccggggtccctcccctgccctccaacacattagtgctgccttccctctcctccctggggagccctgggttctctccctgcagcgctcagctgggcactcactcctcccttcccatcatgctggccacccatgtagccagtcttccccaggcctcagtttccccatctgtaaggtgagcgtcaggaccagaccatctccaaggtcactaccaacccggacgttgtttatgcttagtacacatttgctaatttatttgtattttatttatatgaatggagaccgggaatgaagtagaagagactttggaatgcccagcccaagaacctcaccgcagcctctttcaagtagtaatgaaggaggcagatttccatgagagttgagcttcaggcacagctggtctcacccgtgcctgctgttcacgcttggatgaggactgaacctctctgagcctttttcctcatttatcaaatgaggatcatggttcctgtgtgtcaggccagtgctggggccacacactccatggatgggggcctggccagcagagccaccaatgtcctccttcatcttatttcctaagagtgtcgacctcacttgcatcttcactgtcttcttgaaactagctcaaggcccggctcgtggtggctgttggcctcagctctttaccgagcttctctgtgtgcctagcgctgttagctgctgaggattcagtgaggggccaagtcaaacttggcccctgcgcgggtgaaatgtttggtctggacaggaattcaccccagcgcgttctaggtgccgtgtgaatctgcgctggggaagtctgggaagatttcctggaggaggtgaagatggagctgctctgcaggatgagtagagtcccgggctgaggaggaggttggaatggtgagaatattaaggctgaaggagaggcctaggggctggagcagcctggagcgctcatgggcacaggagagactcgtgcgttgatcaagaagcctggctcgaagtcatagagacagccctgttaataaagttgctgagcacatttcacaaatccacttttactttaataaagggcgatttaatttgtagttgcgtgaaggttcctgagagtattctaaagaggtcataaattagcctcattcctcggcacgcccctcagatgagaaggcagcccagagcttgcgtgggcctctcggcgtagccgttactttattttatggtgatttttcagagtcaggctaagacttgtgcagatgattcgatggagagcagactggagtgacgggcgaatcagctgggacgctgccgagaacccctgtgccttttccggtgcaggaagaaatggaggggaagcttgtacgttgcctcctcttttggggccgccttgtctttcttttttcagactccaaaggatgagttatttataggttcttacgaatggcccactttgtcctcgcccctccttagtcgctagtttgggtgggtgctctgtggattgcagggatgccgatgacctgagaagcctggctgtgctgcagctgctgttcctgaccgacgtcctccccttttggaagtccagggagcagagatccctggctctggccaccgggagggcaaggtctccgtctgtagctttggaaaggtgaaggcatgtgttctgcattggttcacatcctgctttttcttggaaagcgccgtcctggatgtgagcttggattctgggtgtagaagaagtgcagacatggggctgtcagtctaagtgggtggtgggggtggggaatgccctgtacctctctccccgctcccagcaggttcccacaagcacagaccatccctgacctgctctgcaaggctgtaaaacacagacttaggcaatttgctcactgctgattgatatgcagcccgctgagggcaacagcaacgtcttttccattcagcctcatgactcgggaccgcttcccagaaggcctatggtgcttgtcacctctattccaattaagctccatttgtcattaaaaaaatggaatagggatacttgagtgagtgaggactctccttggaagactggaataaaaggtaaaactccagtgtccttttgaggtggaaaatctccttcttattttgcatttctatagcagtcagttactgtatttgcacagaaaattacaatcatttaattagtttcttctcacaccagctcgaagatcttaaaataacagcactctccttccttagtaattttcttgcaaaagcagataatttcctgcaatgttgagctcgccttgactcacaccgagcacatttcttgcaagtcaccatttcctgacgctcagataaatgaagttcaaattagagaaagaaaagagccaggcagagtgtggccgcttccattcagatcaattttaattcagaaagaattctttatgaggcttctttgccgtgcatatttctgaagcatcagacgtagtgataacatctcctaggcctcagccggggagatccagcagttaggatcacctcccagcttctgcttctgatgtaattttaccttataataataatccctcactatttacatggaactgctgattagtaataataaagttaataatcacagcccctatctacgtgccggatgctgcgtcaggcacgtcatgcccatttgtctcatttgctcctgaacagagacctacacagtagatatcatggttatatgcattttgcagcaatggaaaataaggttcggtgtggcaggaggacttgcccccagtcacacagctagtgaggatctgagctgtggtttgaattccttcactcttgagcctgagttctttttaaaattctttttgctggctgggcgtggtggctcacgcctgtaatcccaacactttgggaggccgaggcaggtggattacctaaggccaggagtttgagatcagcctggccaacatggtgaaaatttgtaaaaatacaaaattagccgggcgtgatggcacatgcctgtaatcccagctgcttggaaggctgaggcagaagaatcgcttgaatcagggagacggagattgtagtgagccgagattgtgccactgcactctggcctgggcgacagagcaagactccgcctcaaaaaaaattcttttttctttagagacggagattgcagtgagccgagatcgtgccactgcactctggcctgggcgacagagcaagactctgcctcaaaaaaaattcttttttctttagagacggagattgcagtgagccgagatcgtgccactgcactctggcctgggcgacagagcaagactctgcctaaaaaaaaattcttttttctttattactatttttaaaattgtggtaaaatatatgtaacataaattcactgttttaatgctttttcagtgtatggttctgggggcattcaatgcattcacagtgttgtgcagctgtgaccaccattcttctccagaacgttctcatcttcccaaatggaaactctgcccctcttaaacactaacccccatcaccctcctccacccccgccactcacagtctactttctgtctctatgaatttgatgctctaatggcctcatatgggtggaaccatacacatttgtcattttgtgtctggtttatttcactcagcatgatgtcctgaaggtttgcccaggctgtagcaggtgccagaatttccttcctttttttacggctgagtaatattccactgtatggacaccacacatttcctttcttcatgcatctgtggatgggcgtttgggttgtttccaccttttgggtagtgtgaattaggctgctgtgaacatgggtgtgcagatattttttcaaatccctgctttcagtccttttgggtaaatgcccagaagtgggattgctagatcttatggtaatcctacgtcagttttttttcttcttgagactgggtcttgctctgttgcctaggctggagtgcagtgatgtggtcacagctcactgcagcctcaacctcctctgactaagcgattctctcacctcagcctcccaaatagctgggagtgcaggtgcacgccaccacacctggctaatttttgtattttttagtagagatgggggttttgctgtattgcccaggctggtcttaaactcctaagctcaagcaatccacccgcctcagcctccaaaagtgttgagattgtaggcgtgagccaccatgcctggcttatgttaagtttttgattgagcctgaggttttatctgcatcagaagtcactcttgtggctgccttgtgttgtacccacttgccggtcagtagcacaattgcaacccccaaggaaatccacaggaggagaaacatgtgtggcattaggacaatcccgtgcctagaagggacacggtggcaaggctgcgtcgtgggagtcacctttccctgttctgttctcataacctctgaattctgccacttgtgacccaaggagggggtatctctctgagcccaggaaatccagatctgtcaattttgggaagtcagaaataggctggtctggtgctgcgccaagggtggaaaaggagaccattcccggaggcattgctcggcgcggccgcgcttgctaagggtaaccgtttgccttccaagttcaagcccatttctcttcctcctctgcttttaggcacttttcccaattgactacctcattgaccagttaagtaattcaatttgcactctgtaaaaataaagcactcaataaaaaccctatgtttttctcaattattcccatcaataccacttaaccccagccaagtttattttctgatttttcatttgaccatcaaataggccttctgggcatccactttgagtcctgcagcagctatgacgtcaggcggctgctgtgtacctggctgtgggttaggctccttgggtggaccaaggacacacacccaggggttttctggctttgaggaccccaaactggcacaggggctcttagctctctctgtgccctagactcctgcccatcccaatcctggagaagctgatgaaactttctcagaatgaggattttataattagcataaaacaaagtatagatccagaggaaaccaatttcatggcaatgaagttatcaaaatacagttttagtatttcttcagtaacacttccgtaagaactagcagcaggtgtgatgatttccatagttttgaagttgtgctgagtgtaagccatactttgagatcgataacaactgtgatctggtcttggagatagctgtgatttctgttggtgacactcaggtactgatgatacatttgtgacttgttgcctacttcataatggaggaaatgcctaatttcagctggggctggttgaaaacaaagaggccattgtttctgcatccaagttcatgggttcctgaagaaacagcaggcagagagaatcaggagcatgtagaaataatgccctgaggccggacgcggtggctcacgcccggaatcccagcactttgggaggcagaggcgggtggatcacgtgaggtcaggaagtttgagaccagtctgggcaacatggtgaaaccccgtctctactaaaaatacaaagaaattagctgggcatggtggcagacgcctataatcccagctacccgggaggctgaggcaggagaattgcttgaacctgggatgtggaggttgcagtgagctgagatcacgccactgcactccagcctgggtgacagaatgagactccatctcaaaacaaaaacaaaaacaaaaacaaaaaacaaaaaaacaaaaacaccatgcgaggtaggactcggctggagggatgagatggggacagatggaccccatgggaatgatgcatccctctgcagtcctgtcccctctgccctgccccagtgtccgcgtcttccccaggcctcctctctggtctcctccagcccactaagggtatggactccaggggctcaggggctttggtctgtttcattccctgttgctccccaagcgcctggtgcttagtagatgctcagtaaacatccgaggacttctgaaaggaggagctagcaggaggtcatggatcctgaagctcagaggcctagctttcctgctggggaatctggggagagtcgagtccctctgtcctcgcaaagctggtaagtgaggatctgggctccctggcccactgccggctccacgagtaacctgggaagctctttaacgcactaattaatctccaccccgtggggtggggattatggcacatatctgcagagaaaagagctggctgccagagagacagacagatttgtttcttgcctgagaggagtcctgggcagaggggaagcagtctagcagctgctgactcatggtcgtggctgtgcagccaggtcctggtgacacccacgcctccatggtggggccactgggtcagccaggagccagggtactccgtggtgagaaaacacccattcccaaattgaattagggcatttaaatagcatccttgatgatcccagcctcatctcacccagtaaaacaaaacaaaacaagacaaaacaagaaacccatgagatgggtttgctcagctttcaacaaagacaaatgactctggggtaggttgaaccatgggagggctttcccaggggagagcaggattcgagaaacctgggctttctgacggaaatgactttgcagcatcacccacctgctcgctcactcatccatctatctacaaaccagccccgcacctagcatcacccactgctaacgtgctcatccatccatgtacacgccagccctgtgctgagccttctctctgggccagcttcagaggaatcaccagtttctgagttctcagggggccttctaatggagggagccccgaaaatggcctttgtccacatgtggggcctcgcttttcattctttgtctgtgaatgtcttttcttccaatccacatccacatgtccctttgaggagggctggaaaggtgcagtgctgagctgtgtctgggaaggcttgctgctggcccctccgagcccctcccgcccacacagcctgggccgggagccgacgtgagtcaccgggctgctctctgcgttcacccagcgcctggccagggcccagctgctgggctggagtgtggcggccaccgtggccagacaattcaggctcctggaggcgggcaggttcagtgggctgccccgagctctgagctggggccggctccccagtcctccaggcctgggttccctcatctgcactggggctggcaggatccctccttatggcacatataagtaaaggtacagggagcagggcagatgtctagcgatgcaggagcgagcttcttcagtcccagggaagactgcactgttgtcccctaatcagaatgtgccttctttctctagggggattttatgtggttccaatttcttcccatttcctgaatagtttgctaaagtggaacaaagcccagcatatttcatgaacattcagcgactccagtttacttttaaagaaagtatttctcgttgacatctggtttttcacaagtttcctgatatgaattattgcctggaattctcacctctaagatcaagtcagaatttctttccatcttgcctgtggccgagcagagggctgggcaatgacggggaaatccaaaacccgggaacttctgggacttgtctggggcgggaagggagttttcgggcgccttctcccaggatcccacctcccccagtgtcccttggccctgggtgggagccagcttggcctatgaaggcaaagaagatcagctggggcccaccttcctgtctcaggaaggcaaagaagaccaccgaggcggcccccagctccctccctggcctggcctcctcaccccctgggacatgcagaaggggcttggtgctggccatcttggcttctgagctggggcaggtgggggttagagaccgtccacggggcatgtcgggactgaactcgccttgcccccagccctccagcccccacagggtttctacttcctatggcatttccaaatggcctctggtgggcactgtgtgctgaagactttggggattactggcaggcaggggattggcggggagggaggcagggctggtcttctgccctctgccctttctttctctgcagacacattttctaagaccccctgtgtgccagactgtgtgctaggcacactggacagactagtgaatgattccctttgtacaccccggcagccgcaggcaagggatgaccacggctgtttcaagggcgagaggctgcagctccatcctctgtctgccccagtcctggtcccagcgggatgccagggcttggcttggcttggcttggctctggttgtgtctccctcagccctcccttgcatagggtcccccaagtttttctaggggatgcactgccttgtctcctgctcaccaggcacccctctctctagtcctataggggaaccctgcagagagctgcctctgccccgggccctggtccgagtcttctgagcacagagagggactctgagaggctgcatgacctgtttgcaaggccagcctggtctgtgtgacgccaacctggctcacctagccctgctggggggtgggcagcgtgtggagggccccacctttccagcagacagcctggcctgcctcagggggcccctgcctgcgtccctcaccccggaccacacttctgccctccatggagggagcccctctgctctgctgcctcctggcttcatgtggccctgcaagctgcagacctcgtgaaacttcatctttctcttccctaggagggaaaggacactgaactggccttgttgtagatgggagcacatcacatgtggaggtcttgccccggtgccggacagccagcatatgctcagatgccccctcctcagctggctctgtcaccctgtccttcagcgcccgagagcacgccccgcccccgtctgtgaggacttgctgctgtgccgctcaccttgggccttgcttgtcttcatatctttgtatcccagggctcggactccatcccagcttctggatggcctggcccattctggggtcttgagatacttgtggcctctggggtgggaggacttgggaggctgtgtagagagtcaggccaggcacctctctctttaggaagctaccagcatccccttccggaaacggtccctgccgggaccccagcgtgaggctggcttctgtggccggctccatggtgctgaagcctatccccttcgtagactgtttttggtgggtgggctcgtccccttctcgactgcatgtttggagcagtcaggcacagagttcctgaagtgcaggtgctgatctttgaattttgagatcacttccaatctgtttttttttttttaatcttttcactcacctccctgctgtggggtcgggtttttggcatgatcagagaagggacgaagaccaggcagaacctaccgaccaaccatgagtttttgttgacatcatggattgctgacatctacagggctttggcccaaatttgtgtttgccccagagagcattttgggaggtgttcttggagcgactcacgtatttagcagtgagctatggctctgggccagatcctctgccgggggaaggggtgaagtccatggttgggaccgagcatggtccatgtcctggtgaggttacagccctctgggacgggagcagatggtgacttgggggccccagggcaagagcccatgtcggggaggctatgaaggatgcatgtgtgatgggggcctctgactggggtggcatcagggagggtctctcagaggaggtggcattccccagagaaggacgtcatcagccttgtgtggggccaggtgggtggggacgtttgtggataatgtgaaggctgggcccccggtcatctttggcgcccacccactcacttcctctgtgtgctgagggctgggctttctacccttgacccttattatcaccattatttaaaatagaggcggggcttctctgtggctcaggctggagtgcaatgctgcgatcttggctcactgcagcctccaacccctgggctcacgccctcctcctgcctcggccttccgagtaactaggactataggcacgcgctaccatgcctggctaattttaatttttttgtagagatgagatctcgctgtgttgcccaggctggtgttgaactcctgggctcgagggatctatccaccttagcctcccaaagtgctgggattacaggtgtgagccgccatgcctggatcaaacgcttgaccttgatgcagtgcccaagatggttggctgcaggtgggtggttggtgacaatcccaactctgctgctaacagctgccttgcctatgttctgagagtcaagtcttcccctgtaaaatgcaggtgtatggtgcccacctgatgagactgatgtggctgtgatacaatgagggcaaaagtgctgggcaccgagcttgcaccaagcagtgtccacttctcttattccaggaaggaggcccagtcatccatcacctaccaacccccagcattcattcctgagcccccaacaagagaagcttttgggaaaggcaggcagggggtagtcagccagctgccaatacctcagtgaccccacagggctcttctgggagtggaacggtgacctggcctgggtggagtgggcccaggctccactgctccttggaatgcctgagggtttgtaagcagggctgagtcatggacacaaaatcacttgtgcaagaaatttttgcatttttgcatttttttcttaagtcaataaattctgactttgagttctcattctactgcaagaagcaaaaatttcgcttaaaccttcctgcctggagaaatttggaaaagcttctcagaggtggcgggaggagcaggagagcgggagggagggagggagggagggaggcattgccagggcgcagaccagagctgtggcagagttcagggatggcaagaagagccaggagggagcgtccacgacggggggcaggccatggcgctgggacggtcactccctgacatttttcaggataccattgattgattgattatttatttatttatttcgagatggagtctcactctgttgcccaggctggagtgcagtggcgcgatctccgcctcctgggttcaagcaattctcctgcctcagcctcctggtagctgggattacaagcacctaccaccacacctagctaatttttgtatttttggtagagatggagtttcaccatattggccaggctggtctcgaactcctgatctcaagtgatccccctgcctcggcctcccaaagtgctgggattacaggtgtgagccaccatgtccggcctaggatgccttttaaagacagattgtccacgtgaagttccatcaaggacatacagaccattagggaagatgcaggtgtgacaaggtgggggcccctgtgagaggaggggttgggggctcccatgagaggagaggcggggggcccctgggagaggaggggtgggagcgggcctcactctgtcggctaatccctcatcccttttactctctccccacctggaggaaaatgccatagaagtgttttttgtagtagtggaaggagatcgtgaatgttatctggtgtctgtttctgcataattctatcaggaatgttcccagtcatctgtgtggctaaatcccctcggtggcctgaatttccatggctgccccaccccaggtccctgttgatacagaggatggggagagatattcttctgaaaagaaaagatgggagcggagtgtaggagggctgcagaggaagtctttccttgactctgcctttggaagttgcctcctctcacctggccctctggggttctcctctcttcccagaccctgccggaattgtagcccacacggcacaggtcagcatgtggttgtgcaatggctggttgggcagatcttcccagttggtttaaagttactggagggcggggaacacgttcctgtttcctgtctctgcctttgtgtctcctgcaatgctgtgtacaaaaggatgtgttaagcaggactttggtggcaggtcacagaaaccccactccaactagctgaagtgaaaaatgggaattcctaagctcacagaaccagaatgtccagggggctggcttcaggcatgactggctctaggcgttctaacataggcaccaggcttggttccttgtctgtctccatctctgggttctgttttcactgcatgttggcttccttctcaggcagtcctcccaggtcctggtccatgggaaacaggctaaagagagttgctgtttgtccctgctcctgagggaagccagagctgaggccccctggcctacttgggtcacatgcccacacaaacccatcatgttggccagggagctgaaacgcttccattgcctggctaggcccacacacccaaccctgcagccagggcgaggagtttcgtctccagatgaagatcaagagctgttactggaagaagagagtgcaggttctgggcaggagcccatggagggcagggtgaggagttggaggagggcttagcagcagtcttgaacctcttctggtctcgtcattggggggtcatctgcccacctggggggaacaacccgtggccattggaaaatacccttcccaccttgtgctgcccgggtcttcagaggtgtcagctctgggcggtgtgacttctactggaaaaggtggcagagccactgccattcatgtggcagggccacacccatcccctccttctgcttttatggtttgctgtccataaatccccaatcctcagaactgcttaagccatatccacaataatctggctcatgagtaaacacaacccctggcatgtggtcccaccgccatctcgcctgtgggctgtggcacctcctccatgggtgcttgtgccatttttagtcactgtgcccatggagccactacagtgacgggttatgggatgaagggcactgggaggcacagaggcaagctgtcttgggagagctgggacctttgtgtccagggcatggagggcagcctggggagggctggagatggccctatcacatggtgttgtggactgaaggcagtcagggaaatggtgcagacagcaaatggtgcagaccaccgatggtggttgtcgtagccttggaggcggaggtgctctgtggccacactcattcagtgttgatctgagtcttccagtgccctcaagcttgctgccccaatctgaacccaaataagtcaagaaccactgtgttaactcagggactgctggcattgcaaggacctcgggagcctcgctggggtctcattttacagatgagaaagccgaggcccaggaggtgagtgggttgggcagagttctccccctgggaacagcagagctgggtctagagccaggtctcagtattctcaggccagtcccctttccagatggagacctagagagactggcctcccaagggcccacccctggaaaggtacttggatgccacgagccagctctggctgtagtggactcagccacatgtctccaggagctgggctgggctggaagctggcttcctggggctttattccatgtccctgccccagagctgtgaggttccctgcagcgagtgagccatgggtacaggttgggtcagctgggagtgtttgtttttgtgcctttgcctccagcctccaggtctggggtgtctgtttacaggaattgtgggagagaaggtgagtcacagttggggctcctcttgtcttccaaaaaggaagccagcctttgcttgcagctctccccactggggacagctggtgggtggggaggctgctgtggcttgaaaccctcctaaactcaatgctgaaatttaattggcaatgtaacagtattgggaggtgggaccttgaagaagtgattaggtcatgagctctctgccctggggaatggattaatgctgttgtttcaggagtgggttagttctcatgggagtgggatcctgatgaggggatgaatttcagctccccttttcctctttctcaccctagcctttctgcctcccaccataggatcatcctcaccagatgccagtgctgtgctcttggacttcccagcctccagaaccaaataaacttctgttctttataaatgactcagtctgtggtattctgttacagaaagaggtctaaggcagaggctgggcagattcattcaacccagtgccaaaattccacatggcactgactgcgtgcaggaaggttgctaaggagtagccctgggatagactcacaggatctcagttcccagggtgctcataggtcactgtgttccagctgggatacctccagtgatgggaggctcaccccttgtagagacagcacattccggcatatctggtttctgcagagagccagtgaggtcagcacctagctgaggctgtggaaagaaggtgatgaagctgccagtggggctgcttttctggtggacacgaaggacgcctgtctttgctgttgggtttccaggctgtaggtctgttctgctcatggacttgagggacagtggggttgtgggtgtggtgccaactttgctttattccagggtaatctttagaaagtgagaggtgacagcgtgctggcagtcctcacggccctcgcttgctctcggtgcgtcctctgcctgggctcccactttggcggcacttgaggagcccttcagcccaccgctgcactgtgggagccccttcctgggctggccaaggcaggagcccactccctcagcttgcagggaggtgtggagggagaggcgcgagcgggaaccggggctgtgtgcggcgcttgcgggccagctggagttccgggtgggcgtgggcttggagggccctgcattccgagcagcaggccggccctgctggccccgggcaaggagggacttagcacccgggccagcggctgtggagggtgtactgggtcccccagcagtgccagcctaccggcgctgcgctcgatttctcaccgggccttagctgcctttccgcggggcagggctcgggacctgcagcccgccatgcctgagccttcccccgactccgtgggttcctgtgctgcccgagcctccctgacgagcgcgaccccctgctccacggctcccagtcccatcgaccacccaagggctgaggagtgcgagtgcatggcgccggactggcaggcagctccacctgcagccccggtgcgggatccactgggtgaagccagctgggctcctgagtctggtggggacgtggagaatctttatgtctagctcagggattgtaaatacaccaatcggcactctgtatccagctcaaggtttgtaaacacaccaatcagcaccctgtgtctagctcagggtttgtgagtgcaccaatggacactctgtatctagctgctctggtggggtcttggagaacctgtgtgtcgaaactgtgtatctaactaatctgatggggacgtggagaacctttgtatctagctcagggattgtaaacgcaccaatcagcaccctgtcaaaacaggccactcagctctaccaatcagcaggatgtgggtggggccagataagagaataaaagcaggctgccggagccagcagtggcaacccgctcgggtccccttccacactgtggaagctttgttctttcgctctttgcaataaatcttgctactgctcactctttgggtccacactgcttttatgagctgtaacactcaccacgaaggtctgcagcttcactcctgaagccagagagaccacgagcccacggggaggaacaaacaactccagacgcgccgccttaagaactgtgacactcaccgcaaaggtctgcggcttcattcttgaagtcagtgagaccaagaacccaccaattccggacacaaaagcagcagtgaggggaggtgggcttgccttgtatgtgggaatggtgagctccaccgcccagcccagcactgctccacctggggtcttcagtggtagacgtaggggtccatggccacagacaattcactcaaggccacatcttcttgttttaatcctgtggctgctgtaacaaactgcacaaactcagtggcttgaagcaacacagcttcattgtcttatggttctggaggccagaagtccaaactcagtggtgtgggctaaggtcaaggtgtcagtgggactggctccttcaggaggctccaggggagattgcctgtctttgcctttttcaacatccagaggtgcccacatgccttgcctcatgctccttactcccatccctccaatctctgccttcgcgtctccttctctggctctgaccctcctgcctccctcttttaaggaccctcctaatgactttagggccaccagacaatacaggctcctctcccttccctagagccttaatcacacctgcaacgtttctacaagggaacccatgcacaggttctgggatttggatggggatgtcttcttgggggctgagatcagcctgccctgccctcgagccgcaaagccagttgagatggtggtttccatggttcctctcccggggatgcagaagcggagtgactcttccaattctccgtccgcactgcgtggcggttcccgtggctcttctgatcccccatccgcactgtgtggcggttcccgtggctcttccaatcctccgaccgcactacagctgcgctcctttggatgcttgggtctggcctcacttcttagcctaaagtctttcagagcaagtccggccctgctccatggggctcctctttccccttcacctactccatgctggctgcttgctgcagcctgaccagcctcattgggtcccctccttgtcaggttcctccgcccggcctggaaccttccatctcacccccgcctttctggcgcttgccccactgccacccctccatgagacccgaggaccccgcagcttgctggtgccctggccctcaggcatcacagtgctcagtgatgtctgtggggtggatgagtggatggatgagtggacactgagctgcagacaaaggaacattatttttaaagcacatgtaaccaactcgcctggctcgtggcctctgggtccatcctgcctgctggttccaggggccagagcctgcagcaggaggctcgcaggctacatgcttttacttaggatgaaggttttaaagccacctggaagcaaaatttggcaaaacttccaccactctcaaaccagcaaatatttactgagcatctatgagtggaaggcagttccccagggtggggcagagtggtgcggccgccacaccctccacaaaaatgcccacagctggggccttcggctctccttgactcgttatgtagctgtgtgtgggggtgtgtgacaacacgcacacacaaagaggaaaagtctccaactgttaaatacagcgtgaggatgaagccacgtgggaagcctgtggggtgaagctccgacctgtgggagccgtggggacctgagctgggctcataggggcaaggttcttgaagggattgtgtatttttagggtggcgagggtcgagagtccaggagaggggacagctgtgctggccggggtcacagtgcacggtcccaggctgcctttcccactgtgcagctgggtgatgctggacaggccattgcacctctgtggccgggcttccccaggtatgctggcggggggtgctcttcatgcatgtgcgtgaatggccagggtgggcagagctgccggatgggttgggggtcaggaggggccctcctgaagccaaagtttatctttggaggtttccgagtgggcggacttggcccgagtagaaggtcagattgagcaattagagaaatccccaacgagtagatcctgcattcctcactgcacttggccggctcacctcccatccaggcagttgtcacctcctatttgtgctgcgtaaatggattctaatcgccttcttctcctcgatcacttcaagaatggcctcggtagccataaaggaaattagtttcaggtggaagccttatttttaccgtggcagagaccaaactgttaattacctggaaattgcatgaggatttttgcctgaaaagtttttttcttgggtttaacttttcatagatattaattatagatattggctttagcccactgaaataattcctctctcaagagattaaaggcatttaaaaaatgattccttgagaagcctactgcatattctttgtctctatttatgctcagtgtatgggatggaaacaggacattggggatgtgagcacgattagatgccttttctgcatttaactaaagattgattccagactacatgtgtgttttcagatctctgaagccagtgggaatttgagggcaaagggcaagaaggcaacccttcaatatcataacgatgaatcccgataggaatgtcaggacttgcctctatgatgcccgtactatgccaccttagttcatgtccgggaaatgctgtgctgtggctttcccagcacactcaagataaaacccaaactctttctctggccctttctcattccacagatcttactgcactgcccgcaggcactctgccctgaaacacagtgctcccgtgcactcggccatgctgtgttcttgtagcttctggaatatgctaggcccttcctacctcagagcccatgcctgggtgactccctctgcttggcatgcacagctggctcctactcattttggggaccactatgtctttcttctctgcaccacctatgcctcctgcttgtttccttaattatattctgctaattggatttagctgatctttttgtctatgctgtgtgtgtgtgtgtgtctgttcatgtctatgagaaataacagctttctgaaggcagagacaatgtcagacttcagggccatgttgagtttgaggtaacccatgcgacagcctgtgtcaatatcccccaaacccagactctggtttctctaacttggctttagaatatctgctatctaggccgcattctaaggagcctggtttaaggggtctggcctgcagcctgggcacccagatgattcactgtcgagggctgtggatgagtccattctcacgctgctataaggacatacctgagactaggtaatttataaaggaaagaggtttaattgactcacagtttggcatggctggggaggcctcaggaaacttacgatcatggtggaaggggaagcaaggcgacttcttcacaaggcggcaggaagaagtacagcaggggaaatgccagatgcttataaaaccatcagatctcgtgagaactcactcactaatccgagaatagcatgggggaaaccaccccatgatccaaccacttcctgctgggtccctcccatgacacgtggggatcgtgggaactacaattcaagatgagatttgggtggggacacagccaaaccatatcaggctgggaatttggagggcctgtgggtggcccgcagggcaggaggaccctgatgtgcagggcacagaccttgcccgcagcagccgcactgtgagagcctcacacttgcacccctgtcttctgcaccctcgtgttccaccgtgatgactccatgtcgttgtgaaaataaaggagtgttgggtttgctggatttaagaggccaggaatttgtgtcatggatttcagaactagttccaccaagagtacatacagtttagaacaacagctgccgactgacccctcaaagcagaagacttggttttactggagttgggctgagacttcacattctgaggcctgagctgtctgtgtgctgggctggtggcaggcagctctgatgtgcgaggcggccctgcactgagggagccagctgggtgccatggggcctagtgaggagctgtcctcctggcctcccgaggcattaaccaaggcttgggggagggggtgggggacggccaccctctctctagtgtgtggcatgaattgtttacgggtgagctcctgccgctgagtgtgcaacatggggtctaggggcctcgtctgagtcttctctgcaccccactactggattcaaggcatggtggagtaatggaaagaaaaggaatgagtggatgaagtcctggcagggggagaaggaagatgccattctcttaattcctgatgccaagcagggccagatggagccaggggcttgcgtgattttcaagctgatttctggaaatatctagtaagcattggtttagatgggtgaggttgattcaggcaaggggctgctgtctagctcagagggagtggggacagttgatatttccccagttttggaaagttccatgtgtggggacctgaatgaagtgctcgtggctcccatttccggccccattttgcacgctgtggggtggcctctccaggtgcgtcccaggtgtgaaacatgccactttccagctccttcccaaggccaagcttggtcaccgagcagtgggaagtgacttggggatgagtttgtgagaaatttccagcacaccccacgtttaattccttttctgtctccaggttgccatagaaagaacatgattaattaagcagcacccacacaggttgtttaaaaaaggaatgatttttcaaaacaaagtaatgccccagtggtttgtcagagagagagagggaagaaagctttaataagcagaatgctgtttaataaatcataattatttttgtgggcaaacgtgtcagctcagtgacggcacccaattaaacatacaatcatgttgactttgcccttcatactcacagagccgaccatgcccctgtgggttgacaagatgtccccaggttcttgtgggcaaatattatcacctttctttcccctgagtttttgatttgatgtccttgaggagttattcgcagactttggtgtgtgtcagaatctcctgaggacttgttgtaaaggtgagatgggagctcgctgcaaacatcccggtcccaccagaccctgggcctacgggtggacccagtgtctgtagtttgaatgagctctctgggtattacatgcatatgtccccaggtgagcctttttcaggctgcgtgaccagcggaaccagagaccgccgtagtgaccttctgtgtggctggcgctcttctcattcaaggtgtgcaagagctggaattgaactgggggcaggttcggattaccccaagtcacccacctctgagcagaactgttgcagccacagggatgtcgggtggagcagtggtttggcaaaatccacccagcccttaacatgctttgggcccgtgagggcaccggagaaacagcgaaggaaagacagaagctttccctcctgaagcccacagtccagggatgggaggcaaaagccaacactcatcttccagagctgctgggccgtggagcgggcagctcattctgtaggaggcccaggcaggcttcctggaagaggaagcacttcactgactcttggagaaagatattaagttaagcatatatttaaggagtattttctgagtgtttggccctgtggtaggaggcactggttcaatatggaccaagccattcagatccttaccttcacggagcttatattttttagcatgggagagagacagaaaacctaaaaacagtgaaacaagttcagatggggctgagtgctatggagaaaatggagcaagtgatgacccacccgggccagggtggatgggattggctttggagcccaccagacaaggggaaagggcgttttgggacctcagatgatggaatgaactgggcatgtatgggggacagaaagtgtcatgtgacccagcagtcccctcctaggcataaaccccagagagacgaaaacccgtgtctctgctgcagcaagattcatggtacctaaaggtgagacaacccaaatgtccagcaacagacacggatgaacaaaatgtggcccatccacgtggtagaatattattcagccatggacaggaatggagctctgacacctgatacgtgatgaaccttgaaaacaggacactcagtcaaagaagccagccacgaacagccacatactgtatggctgcatgtctatggaatgtctagaatagagacagccatagggacggaaagcaggtcagtgttgcttgggactggcagagagcggggcatgggggtggtagctaacgggcatggtgatgaagcactcgtctaaaatggactggtggtgtgtgcgggggtctgtgaatatgctgacagccactggcttggtgcactggctggcatgcgaatgagattccagtagagctgtttcaagagaagggtagtgcggccggggcagagggctggtgcagggagggaggccacgtgctgtggtcaggcttcccaggctgtggcaggagagagcgggaggatctggaaagggcaggtgtagggagggctggggcgtacagatctgtgtggggtgtgggtgctgggcacggcagctgtggtctccctggggtggtcatggggctggcctggggagggttttctgcagaggagctgcagggaggctggaaaccattcctcttctccctccactccaccttgactcattcactcaagaacacgcaaagacttctttgcttttttcaggcaggccctggctgcgtcggtggagggagggctcctctgcctggatcctaactggaccccaggatgctgaaatcccagacttcctgagccctgaatttgccaagatttgtattgtattaaaaacaacaaccaactgagcaacaaaaaaacccagactcgtgttctgatgaaggacgggactcatactcgttttagatcttgcaagaggaaaggcctaaggaaaaagaaactggacatgacccacattctgattcctcacagataccaatggccagcttttggtgccttctcattgcatttttcttctgtgcaaagaaaaggaccttagtgtatatgcgcacacacacacacacacacacactcacacacagagtttggaattattctttgtgcacctaatgttatattgtatgcattttcctaccttggtgaaaatcctttggaaaggacaggtggccacacggtcatttctttatttttgtatcactgtgtccttggaatgatgctaatttttacattataaataattatgctgatgtgcattaacccaattaatacccttggatacaactctttatctgtgtgtctggtggtttcctaggatgaattctctctgaaatgaagtcacaaggtcaaaagtcaggaatggggcgtgtactcagtgcccatacggatgttctctagacatgtccaccaagactccccagaatcacagcatggcccgtgtgtgcttaagctctcagtgcaggtgcctcaggggcctcctggtgccttcctgggaagggctgggcttgggaagggcatctgggaagatgcctggtctggcctgtggcccacacctgtcgcctgtgcagttatccacccctggaatctgaccctgcctgcctcattctgaagtccatgctgttaagtggctgttaagtgctgttaaggcccagagtcagtcctctgggcctcagttttctcgtctgttcagagggatgactgatacctaccaggcacagagtaggaactcaatggctgttgcatattattaattgtattagcaaattaaaatagcaatgcagagagggtggggctgctgagtgagctgggggtcccagggctggtgggggaaggctgtgtggcctggcgtgctggtttccagggcccctctaggcaccgcagcaggatgcagatccagatccatctgctgggaagtctccaggaagcttggctctgcccaggtggcttgggaaccttgcagggctgagccccagggggctgagccaggctggggaaggaaggtctgacaacatttaattttctccttgaaatctgcctctagcttaatcctcctcaagtgtgaagacaaatgcaccattaaggcaccaaacagggaggtggagtggctttttaataatttgcgatgagtgttaagggtgagaggaggcggggctgggactgccacccctgggaagctgcagcagcaggctttggccaagtcgtgtcctctggtctcagaaacctcgccatctggccttttgctttggtcagctgctgcttctgcccacacctgtgacccatggtggtccatggctgggggagtgtattaggtgctacacacttttaaataaccagatcttatgagaactcacttcctgtacagtgcaaaggagggtggcactaaaccattcatgagaactccatccccgtgacctccccccaggccccaccgccaacactggggaatacagtgaggcttgggtggggacagagtcaaaccatatcaaggaggaggaggtgtggcactgggtggggatcaggggcccctgtggacctcccactccctccgatccttccccttccaggacagtcctggggcttggtcctctctcatgagctcactgggggccgaacggacctggaggaccctgagcttcattaattatgagttgtttttgccaaggacatttcatctgtgacatctttgctttggtgtaaacagaccggtcttctctctacctcatggagagtgatgtatgcaatgtatgttccataaaatgcttccaagggagagagaaagagaatgtgatccaattatacaaaatatgttggcagactcctattgatccttcaaaaccctaatgcagtattgcctcctccatgtagactttcttgattaccctgacagagttacagagttactcccatcttcccctacccgtgctgtgctgcacacacatttctgcttcaggggaggtctcagggagcttttatttatggtgggaactgtgggtactgtgatcgtggctatagtcatggctcctggatgcctgcgtccagcccactggactgtgaactgtgagcgaagggaccaagtcctcttcatctttgtgtgctgtacccagccctgctcttggctcagagcagaccggaatcgttctctgttgaatgcaaaggagcactgagaacagcattttgcgaaatccgaagcatgacagaaatgtttactgcatcacctcattgaactcttcctctggcttctcctctctctgttgttctgaaccagcatggcacggccaacgcttgatgatggctgcagtcctgggaaggggctgggaccggggctcactgctgctcactttgtggttcaggcccagctgggggttgggggtgatttccacttgagctccagtgtggttgctgctagactgggctggagctggtgcacgggggctgcatggatgtctctatccgcaccctgtgagctggcccaccaggctgtgcagacatctctctctctcctcttgtgctctcggggcccctgtggtggttctctgctgtggaccagttggggcttccttccagcgtggtgtccgtacagcagtgggactgctgccatgaggcctgtgctgtggcgagggggttcctgcagagaaggcagaggctgtgtggccttttgggtcccagccttggaagccacagagtatcacttccactgtgaacctgtcagaagcctgtctgggttcaaggggaggcaacaaaggccctgtctctcactgagagcaatgtcaaagcacttggggctgtgtttgaactccgccaccgtgagaaaacgtggctccggagggtctggacccccaaagcagcctctatagcctgggggcctctgatctccagggatggctttccttgctgctgggagggctggaagctgcaatgccaccactgagggagtgtctatggtggcaggcaccaggcatgcattaccttttctgctcccagacctgggaggtggcctcactgagcccctttgggactgaggcttggagaggtatgcagccagcctgaggtcacaaagcccaaggagcagagcctggattggaacctgggcctgtctgacctcaagcctggccttgctggacctctgcgtgtccttccagggcaggagctgatggagccctgttgaactgcagtgtgtgccccatagctcacggtcagtgccgttccgtttgctcgagggttaagtccagacgtctgtgacggccgggtgagtgggggttggggggaatgtatgaggggactcatccggaacaggcggcgggcagaggggctgttttttccaggcacactaacacacgccatgcaagacaaagaaaaccccggccccttcccccgaggccactaatccagaccgccatctgtccccagctttcataggccacctccctcagagtcaccgctgaggttaagatgcagtggccctgcggcggctcggtgtggagctgtcactgtgccagagctcatgggcagaccctgctccgttggtgggggatggaaggggggcacgcctgctccccaggccacatcttcaagcaccgccgggaagcaccagggcgtggcctgtttctgtttttgttttttcccttctgggtctcctcatctctgggatcacacgcacaaattgaatgatgccttgctagcaagtgagttcctcgatgccgccatgtggctgaagggcagtggggccatccctgatggtgccaccgcggtagcagctgtgaccagcacccctcacatttcatccacaccagcacacctgctcttatgcacctgtgggtactcttatgcacctgtgggtactcttacgcacttgtgggtactcttatgcacttgtgcgtgctcacacacatgcaggaggccctgcgggacaggaaggaacatcaggcttgagcaatgctgggttggaacccagaggccagcagtgcttcaggcctctcgagacctgccaggataggctccagcctggctccacacccccacttgcagcctgaggcctggctgaggtctgtgtttccctcgcatctgtgcttatcaccgctggccctgggttcccctttcctgtgctctggctctgatcctctctgcattaaccgaggcgagggagccgctttcttctcgacttctccagaaaactgctgagcgcctgctccagagcagacgtagccctcatcacgtcctccacagcctccacagcagcctgcaggttgtgatcctgtgctcttctggggccttgtgggtgaggtgggctttcttgagatttggtggaaggtggcagggggcacgttgcatcccttccaggcagacacacctggcgcccctctgtgtggtggcctggggtgaagagttccctccagccccattgccagggagtcgtttcccagcctcacccaccgcgctgcttcctccctccttcctcgcctttcacccctctctcctgtttcttctccccagtcccaagagcagtgaaaccaaaccctctgggtcctcaggcagagcggctaaacgcagttttgtggctgtggtgcctgctgtcccctcttccaaaatcttcctgttggggttttcctagaggagggcagctccctccctggaggtgcggtgggctcagggtgccggggagggcatggacacctgctttctccttctctggggctcctcatccagctgtgaggcagggggtggcgggagctgaggatgactgaacgggagcaagcgggagctcatgggtggcatttcttggccacagtgtcctttgcctgggctgctgtgacaaaggactgcaggctgggggcttccacagcagaggctgattcttcacagtcctggaggctggaagctaagacaagatgtaggcagggttggttttcttccgaggccccgctccttggctcgcagatgctgtcttctcccggcatcctcgtatgtgcctgtgtcctaatctcctcttcctgtgaagataccagtcacgttgggtcagggcccattctgaccaccttcttttaaaggtcctgtctccaaataaatacagacgcatcctggggtgcagggtgttaactagggcttcaacaggtgggttttgaggggacacagttcaacatgtaacagtcacctgcatgtgtccggtgctgtggggaggcctagaagcagaatctcagcaagggtggatgaggtgcggattccctctccagtctctactgagcctaaaacttggcatattccttgccttctgcgtcctctcttgaagatgaaggtgatcgtcctgcctacacaggctcacggtgagaattatgcagaggacatggacttggcctggcccctgcatggtgaggagtggagaaggggccatctccaggtccagctgtgggagctgagggcactcaggacctgatccactcctggatccacttcaggacccgcagcttctctgtggtcagggcttggggcctacgactctgtccagctgctctggggctgctgtggccacaggcatgtgctgggtggctgggcccaccctctgggaccttcagtccatgcgaccagggccaccatctaaaacaggggagtgccccatggtgttcctccatggcatcagcagccgggctggtgccccctggatggactgcatgggatcccagtcctgctggccagtccagggctggaagggcccattcccgtggccaggccgtcccgtccctgccccgagtggacttgcgtgaggcctgccgcgccttgctctgcttcgtggcctggtctgtgttgaggggtccccgtgcacccaggcccctttgattttgttcctcttgctattccctgggccctgttctgggtctgcctgtgagggtgtcctttctacttttgggtataggggtagcttgccgtgctcggaacccacaggcaggagcctctcctccaagggtggccccatctctgcataccctgtttcctcccccagaacatctccttcccccataattcccacacagtgaaagctttccaactctgccatgccatgaccccctaaagaatgtccctgccaccagctgacaggagcccctctccctgggaggatctcggtgccaatttcttagcacccgggactgagaatcaagagggtctaaggactccatcctcttcccttgctccaagggctctagaacctttccagaaagagagcctctgtcttgtaaagttggcctgccttcccagggagagtccacgctggagagcacccaggcttccagcacagatcgtctgaatttcctccttccggagcttgcctggaatccctcctgtcatgatctggaccaaaccttacttggctcatgcccagggcatagagggctgaggtcactccgaggctgaaaaagggcctaagagcttctgtcacggtcgtgggtgttccagggtcgtgggtgttagatctgcatggtgttccgtggtcaagtcttcgagtctctgggcaggagcagtgtcatgtgctcatgtatgaaggagatgaagatggtccagtcttccagtgtctgggcaggagcagtgtcatgctcgtgtatgaaggagatgaagatggtcaagtcttcgagtgtctgggcaggagcagtgtggtgtgctcatgtatgaaggagatgaagatggtcaagtcttcgagtctctgggcaggagcagtgtcatgtgctcatgtatgaaggagatgaagatggtcaagtcttcgagtctctgggcaggagcagtgtcatgtgctcatgtatgaaggagatgaagttggtcaagtcttcgagtctctgggcaggagcagtgtcatgtgctcatgtatgaaggagatgaagatggtcaagtcttccagtgtctgggcaggagtagtgtcatgtgctcatgtatgaaggagatgaagatggtcaagtctttgagtctctgggccggagcagtgtctggagcagtgtcatgtgctcatgtatgaaggagatgaagatggtcaagtcttctagtcgctgggcaggagcagtgtcatgtgctcatgtatgaaggagatgaagatggtcaagtcttccagtgtctgggcaggactagtgtcatgtgctcatgtatgaaggagatgaagatggtcaagtctttgagtctctgggccggagcagtgtctgaagcagtgtcatttgctcatgcatgaaggagatgaagatggtcaagtcttcgagtctctgggcaggagcagtgtcatgtgctcatgtatgaaggagatgaagatggtcaagtcttccagtgtctgggcaggagtagtgtcatgtgctcatgtatgaaggagatgaagatggtcaagtctttgagtctctgggccggagcagtgtctggagcagtgtcatgtgctcatgtatgaaggagatgaagatggtcaagtcttcgagtctctgggcaggagcagtgtcatgtgctcatgtatgaaggagatgaagatggtcaagtctttgagtctctgggcaggagcagtgtgatgtgctcatgtatgatggagatgaagatggtaaagtcttcgagtgtctgggcaggagcagtgtggtgtgctcatgtatgaaggagatgaagatggtcaagccttcgagtctctgggcaggagcagtgtcatgtgctcttgtatgaaggagatgaagacacccagtgcattggtcagggttctccagagaaacagagccagtaggaagtgtgtgtctagatctctatctgtatctatatccatatccatatccatatccatatctgtatctgtctatatctagagattttaatgtatatattttcatatctatgacagaggtttgttataaggaactggctcacataaagatggaggctggcaggtccagaatctgcaaagccaatgtcccagtttgatctgaaggctggcaggctgctgtagagcctggaagagctgatgctccaggttgaaggctgtcagcaagagaattctcttttaattggggggagggtcagctttgtcttctattcagacctttaactgattggatgaggctggcctgcattgtggagggcaatgtgcttcactcagtcttctgatgtatacattaatctcattcaaatacacccctgcagaaatacccagaataatgtttgaccaaatatctgggcaccccatggcccagtcaagttggcacatgaaattaaccatcacacctggtaataccatccacccatccacccatcactcatccgtttgtctgcatctgtccatccatccatccatccattcatccatccatccatccatccactcatttgttcattcacttagcaaatgtttatggaactctacactgtgtggtgcactggggacccccagatgaacggggcagcctactgaagcagaaagtggaccatcctgcaccaggggccaggcagcatccggtggggacacagaggagagggtcgttctttttgtggggtaagatttgggaagacttcatgatggaggtggcctttgcactttaggaatgaatgtgactgccatggtgtgggtggtcagcagaggaggcattccagactgagggcacgaggacaaggatataagtgtggcatctggggggattgggagagacccaggctctcggggtggggatgagactggggtggggcttgggctggatcatggagggtcactcacagggtgcacttgggtgctgctggagatgcagatgtcctggcccatcctggagctgtgttctgacaagggccccgtgattgctgaggatgctgacatctgggcagcggagctgagatgacggagttgcggatggcttctgcggagggtggtgggagagtcactgtcttgcatagcttggggcacagcgtggagcaggattgggggaatggaggctgcgggccctgggggaagcatgggctgtgggagtagcctaggggagcagtggggaggcctgggctttggcaggatggatgaggggaaagctgcctggtggccaggaggaagggggacaccccagtgaccctgtggccttttcctggggaggctgctgaggtctgagccagcccagtgcctgttccctgtgggctctgctcctggtgctgccagactcctaggacccagggcccggcgcctggacgccggagagcgctagttagcgagcaaggcatggtatgccagcctcattatgtcaccccccacggcagcccaggatggcggatttattcttttcatcatctctacagccccctggggttctggacccaagctcttaattcgctttcctgccaagcctcgtggtccgtgacctttagactcccgctcagctcctacatttcaatctgagccctcggtgctggggctttgcataatgtgggggctcctgcccgcgccagctgtgccatttctgtgagggatgccacactgtgtcgatgcgtgcccctcccgcaccctgctgggagctgccctgggccccctcagtaggcagcgacactgtgggtcccactctgtggacagggatgccatgggggtgcccagggcacccggttcaattctgcccaacagactgtcatgtgtcagcctctgggggccgagcatggtctcaaagtcaagatttggtaaggcactgggggacccccacccttggggagtgtttggtcccatagagacactgctgcactgtcagagacaaggtgtcagtgatgggcgcagtgtaggatggccatcaccagagctccctgctcctctgcactaggaacctcccagaggctttctggggcatgggtcagctgagcccaggagtcaggcttcggcacccgcatgttcaactactgccttcctgatggaggaggctgggctgggcacaggcgagtccccaaggtacccgagggaggccaggtactgtcactgcaggcagcaggaacggcacggcagagggagccttccagagcagggggaggcgtcggccagccctgagaactaggaagggtggtgtgggacccagacaccaactgtggactatgcctgcagaagccacggtggggacaggagcacatccagggtgtcatcatgatgacgtctcctggccaccgctgagcacctgctccagggcagacgtagccctcatcacgtcctccacagcctccacagcagcccgcaggttgccatcctgtttccatccaggggcccggacactgggccacagtgcagtacagaccctcgctgggctcagggtgagcagacacttgctgggttcagggtgagcagacactggcagctgtggtggtgggtggacggggtgggtgctgggacgaggactcaggaatgaggctggcggtcaccgtggagtgcagcgcttctcaggtgggacgttctaaggtccccaggtaatactggcctggtcccccgtctgatgctgcagggtggacttctgagtgtcagagccaggccatcctgcatctgagtcctgtctctggctctgcccacctgggcctcaggcgagcctgtactcctgcacgcctcagttttcctgtctgtaaaatgggtgccgtggtgcaaacatcagagggtggtggggaggagtctgaggtttgcacttgtaatacactgtcctgtccgctatcccatccccttctctggtctcagtttccgcatctgtaaaaggaggctgttgggctcaggagcaagatggaaagggggtgggggaggaccgtatccccgagcctctccagggagcccatgcatctgtgcaggcataggggttaatggaccacccactcccaccgagcccttgatcctggcagccccatctccccaggtgctggagttactaggacaaggaccttgatcccccaccagaaagatgcttgggatttgggctgtcatcacagtggcaggttcttccctcgccctgaaatgtattgattcttttgataccttgatttcgagatgtgctgggtctgagctgcctggggccgagaatagtagcgtgggctttgcagttgtggggacactgccttctccaccctccagctgccagcaggcctgttctgctgctgcagaagcaagggtgctgagttctcccagaagtttccagtcattgccatgctattggtctttcattacttttaggaaggaagtattactttgaattgcatcctgtgctgtgcaagggttgttggcccaaggacttccaggaacactctgtggcccagtgacccagcatggtggcctctctggggtatcactgggcggccgacgtggccacatagcccagggctgggaggctgatgctctcgcccttgggtccctgagcttggaggagatccagcttcagttccagtcctgggctctgcaggtctaggcggcctccctggccattgtcctctaggatctgtctccttggccagctcccagcagctcacgtaggcttctgtctttgctgtcacggtgcctggcatacagtaagagcttagcacatgcttggaggactctgctgttcttaggccctgacagcgcagcctgccaccctctccaggagcctgatgatggctgccccaggctgtgcccctccaggcagcctgtccacggctgctgcagttcaggggacagactcaggggcaggcagtgctggggccaggaggccggggaaggcctcgccgaggagacaggggctaggctgggcctgaagtcttgtggagtgcgtggcaggggaacttaggcctggggaaggcagagcaggagcgagttgggcacagggtggaaactgaggctgagcatctggagctgggctctgcgttgcatcccgtgagggtctgaactctgtgtctatctggcgttctccagtgatttcccctcctggagcctcggtgtccttgccggtgaatggtactaacagcagataggcgggaggtggcgagcacacagcactgtgccggcttgcatgagggcgccttgtgcagccgcaccagttagtaccccacccttctgctgcccgcgccaggctcagctgaggcagggaaactgggcgtggcctcatcgccaggaccctccttcttaggcagcctctaccttcatccccacagcagatctttggggcaggaactggtaagaccctcattttctagagcaagaaatggaggctcagagaggcatggccactggcctgaggtcacacagagggtccaatcctggtccccttagccttgagtgactgtgtcttgactgtaggctacccaggtttctgcgactgcagagaacacagagcgggtggatggggagcccccagaggtgattagcggggaggtgtttgtggcctggcccctgaggggtggcttcctgggaagggggtgataggcactagggtagagcgccctgtgtacttggggcccattctggctgtttgtgtggccgttgagaggccaggccttgattgtcagaggggactgattgtgctgcctgagtctatccatgcccactctgatgagcacttagtgggcagagaggcttggaagagcaggcgagtgctggttccgtttgctgcaaaggtgagatgcctcccttctggattcccgggcagcttatcgtggcaggcgatgttgctagcgctgcaattccatttagacaggtgtgagcacccgtgaaactctaggtgcgagtgtaagggttgccaagccttgaaagagtctccacgcactcataaatctttactagatgctgaagatggagcagaaaacaaaaaagttgaaaatccctgcctgctggcattctagtggggaggaggcatgtaatagcttctgatgggtaaacacgtgcctgttggccttcagacacttgcacgtatggacgttcatgtgggtacctatacctgcacagaaatgcattcatgtatgtgagtgtgaaaaggagaaaataaatacagaaggggaatatgaagtgtctggaaatggaggagcttggcgttttaggtagggtggccagaggaggtctcactgcaggtgacttttgagagattctgggagggaagtgagggcaggagccacgtgggtatctgaggcctgagcattccaggcagcagaacggccagtgcaggggccctggggcaggagtgtgttgccaggctgaggactgggagtgtgtctattggcagcaggagagtgaggggagtctgagagtcacgggagaaaagacaggaggtgctggggcaggaggggttgatggcgtaggtgaggggcatcggagagaatattctctgccgctgtgctgtgttgctgcctagtagagccactgttaccggtttcttaccatggttttattatttattaattattttttgaggtggagtctcgctctgtcacccaggctggagtgcagtggcacaatctcggctcactacaacttctgcctcctgggtttaagcgattctccttcctcagcctcctgagtagctgggactacaggcacgtgccaccatgcctggctaatttttgtattttattagagacagggtttcaccatgttggccaggctggtctcgaactcctcacctcaggtgatctgcccacttcggcctcccaaagtgctgggattgcaggcctgagccaccatgcccagtcatttttattgttttaatgctgtctcatctcacaggagaaacttctgttattttccagatggagacctggccttgggggagtcccagggctctgctgagcccacctgggaaagactggtcgggtggggctctgaggcagccatcctgagatgctgggcctctgtgccagcgcacatggtcactggcagctatttttagttcctggcagtggtgcaggaggagtttggggcctcaagtccggccgagaacagaaattggaatgtgaagtttctgacaagcagcagataacatgggcaattttcatcttcttctttagtaaatccaactttaacaaaattgattgcaataaaaatagacagccttttcaagatgcccaggaaaacctcctaagccaaagggattcctgctgaaaacaatcttaacttgttatttgaagaaaggctttatgctcctggtggccttctggtctgtgtccgctgggctgctgtttttagaagagacccctcttggctgctggtctcaggtggccacagtgacccacagtggctcctcccaaggggaccctgttcacatccttctcaatatagttgcagccagggagtgaaccctgggccgcaagactaggcactgactctagcatttaatacttttatttatctatctatttatttatttattcagcatcttttgaaaaggacctattatggaccaggtattgagcttgctgcaacgggtgccttattgaggaaagcagacgggattctatgtcctgaaatgttaagtcttatgtttcagcctctctgggcctctgttatcccatctataaagtgggaataataatacccagtggggagggccatgagtttacgtcagatcctgattgacaaagctctttggaacaggcagaacgatgggcccaaggaggggagtttcgttttctccttctgcttgacatactctattgtggatgttttttagagtgtgatttctctaggatttgtaccatgatccatctgaaatgtgtgtgccgttttccttttgcttctaaattagagaactatcaaggagcatggtgccagagtgctcaggagttcttgggataccagtggactgtgggccaggggtgctgttggatggctgtcatctgcaatgtgaagtgcatcttctttcggaaacaatgttctttccgatgcgctggcaagagggagacagcattctatttgactcatggtgggaatgaagaggccacgtttgcagaggccgaatgacatgactgtaatccaactcttccatgaaccagatgtactcaaaagaataaacaatgattttattaattttggatgctggtgcttgaggaaaaacagatttaattagatttaattagaagaggctggggaggtagagggagtctggggggggttgctggtactgcatacagctttgtgtgttgctaatgatgctttttgctgtgcagaaagtcaaatccagactgaggctgttgttaaattttttttaaggtatagcagccatgctgctggtagggctcctaggtccttgcctagctaggaagatggctggtagcagccttaagccagacagttctcactggtcactgggtggcgctgtgagctcagagcagcttggttgctctcaggagtgaggggcctgtgtgcgtgtgctcacgtgtgtgcatatatgtgtgtgcctgtgtgtgtgtgcaagtggcatcagtggggatggtggaagccaggcctgcaccctcacgtggttgtgtttgtgttaatctgtggtgtgattaggagcgtgagctgctgccctgcgtgtgtctgggtttgaatccagctcctcctgtcactagcttggtgcttctgttttcgcctctgctccctctctggagtctgtggctgacccctgtccgccagctcctggtgcacacggcctccctgggttgggctgggccagtgagccctctgaggtctgtcccggccatgtggctgtggcactctttaccactgctggcctgtcacccccatcacccctgtgccctcgctgcagcctcttcatctgggccatccgtggctgcatctgccccagcagctccaccactgggagcactaggcatggcccacgtccctgtggagttcagcagggagctgggcacagcactggactcagcaggagactcccccgtcctcttggcctctgtggctccttcctgtgctccccagaggctccttcaaagtccctgtccctccttcctccccactgccctctgctcctgccactctctgcagaaggttcctttgtgcccaggatgctgctatcagttgaagggggacctcctcctcactcacgggctgcccgtggctatgttggcagcttctgagcttctgcagaaaggctggggcccagcaccgagggatctggggcagggctgtggccgggagggcccccgacctcctttggactgccaggagcagctcccctgctggtctctatacctggttggagtccccgtggccgggacagtggctccaataaccacgctcagcggccctcctcttcctctctctcttgctttcctggagggcttcagttttcttttttgaatcttcctggtcccagacccttccctgggtgaaagctactgtcaccaggctgctgactgctgactgtgagcctgggatctggagaagggccttagggagggctggtttgtttgctaaaacagcccctggggagctggggctgggcccggctgggtcgctgggcgagtctcgcacttggcccccaggataggcctcttatgggtcatttccttcttgtaaagcaaaaagcaggggttctggccgaaaagttctgaaaagaccacttttgccctttcggatgttagggaagtgaataaaagagaaaagaactaactctttgatttctttatctttgaagataaaagcccaagaatttgtcaatgagggtgaacagcccagagctgccttcatctttgttgaaactgctttggggaaggtggacgttgttcctggaagggtcggaatcttgtgccgtctgtttggcgagcacagccctgagtgtctcgtggtggcttcttgtctgtggggagcacaggaaagctctgctctccacagaagggaatctgagcttcctcactgtagacccggtttctaatttcagctcttgcccttcaaagctggggcctgggagagtccacctgacgttgttgggcctccgtgttctgggctgtgatgaccccggccccacggggctgtcgtgatccccgaaggagatggtgtcaggggagcttgctgcaggggcagagaacaaaacaccaggtacctgcgggtgttgcttgcacgtaccaccttgtcacctcctccggaagaagagagaagctgagaaccctgctgagctttgttcttatcaggttttacttctgtaaaaaatgtttcaccagcaaattacctcgatgagtccttcctggggatttgtaatttgtttgatacgtaacgcggggccatccagggtgtcagctggaatgaaagatacactctaatttgccggggagcttggaggctggagtgatgataattagaagtgattatcttcctctgattctgccgaacgtttccccgtcctcgtggtggaggtgggaactgcgcaatgctgggaaaggttgtgactgccctgaggcccagccgccctgagagcttggtcctgtccttgttttctgggctgggctgtgtctgcatgttgaagggctgtctttgaaaatggccttcactttctagccccggatcctgttggaatcctgaagctgcaacttgtaaacctccccctgaaggggcagtgagagtgaccatgacagtgacagtaagagcaactgcccgctgtggtgctgtctccaaaacaccctgagagtagggctggtggctgaagtcgggtggtttacaccccggtcgaccttcatttgcagttgccagataaaacataggattctcagctcaatttgaattttagataagcaacaaataatttattattattattattattttttgaggcagagtctcattcttgttgcccaggctggagtgcaatggcacgatctcggctcactgcaacctctgcctcccgggatcaagagattctcctgcctcagcctcccgagtagctgggattacaggcttgtgccaccatgcctggctaaattttttttgtatttttagtagagacagggtttcaccatgttggccaggctggtttcgaactcttgacctcacatgatctgcctgccttggcctcccaaagtgctgggattacaggcatgagccacctcactaaaggcccccatttcctggggggccggtggggcttggctggtgggcagaggacacccagtgttttaaggtccctgcttgtccaggcctcactgccctctgtgtccctggttagtgctgtggagaaggggtgggacatgggccccggttgttgtgtggtccagcatgaacgctcccagtggccctatagacctcctttctcctccttttcctcacctggacgtggaatgagggtccagcctgagtccctcctcttcactcagttttttacttactgtgcactcttccatgtcaggcactgtgagaggcctggtgcatggttgtgatggcgtcagatgatgcccctccctgcccttctggggtgcatggtttggttggaggaggcaatttgcagtgagaaacaaaagaatccacaggagacgcactgagaactctgacagttgccagcacacgatgccattccgtagtctctccctggttaaggtggttttcattttcttttccgttccgattctgggtgcttctgagtgcctcacatccgtttgctgaaagtgctgcagagcgactgagtgagcacttggggaaatgagcaaacatctgtgtgcgtgtgtgtgtggccttgctgggcgctgggatgcttgctccgcaggctgtttagctgacggtgttgagcgtctactccgtgcctggcagtgggagtgcagggacaggtggagttcacagcatccctggctgcagctgagtgcagcttgactgttgggggtaccgggcagaggctgccgtttgactggcgaggaagctacctacctctctgttattacatcacctaggcagcttcaggaccctcagacccaccctggctgccgcactgattcggtagggccttcctcctgctgtggctggtccttaggaaagcggctgcgtgagagtcacatgagtgttccctcggagcctttcagagccctgttgtcttcttctttttttaaaagacagggtctcattctgtcatccaagagtgcagtggtatgatcacaaatcactgcagccttgaactcctaggctcaagggattatccaactcagcctcctgagtagctgcaactacaggcatgcaccaccacgcctggatgattttttttttaaattttatttttgtagagttggggtctcactatgttgcccaggctggtctcaaactcctaggctcaagcagtcctcccaccccggcctcccaaagtgctgggattatagtgtgagccactgcactggtcttctgaatcaatccctgaatctttagctcactgcgtcatccccaagcccgtctcttccccttcctctccaccttggctggacacctgggctatcatgtcctttgctctctctttctggagtgaatttctccctattcatcctgctttcccaagcccgcccacacttccaggcccaattcaaatgttagcttttgggtgaagctttcccagccccctccaaagtggctttcccctggtccagactccgtggccattacttcccccaggatttgagctgatgctcggtcagtcttataccagagttagctgcaaacatgtctatgagcgccccagcttgtcgcctgcagtgggcagggatcacaccttaccattcccaagttgccgtcacaatcgcttggcccagggctcagcaccgggaaaacgctggttggatgggaggcactggggcgcccatggtgggctagcagtgacacatgctggtgagtttccagaggacggtcagccctggtcctccttgagtgcgtcattggctgcagggcccctgggggttgagggttggctcggcgccctggtgaggtgctgaccccaccccacaggctttctttctccatgagggatctgagttccccctccccatccacgcacaagctctgggggattgcacttagttgtcacgtgggatgttctggtctcgccagcattgagatgctctctgagctatagaaatggcaagggctggatttaggaggtaggttttggattttgggcaaagaaggggctagggttgaggagatcttggccattctcctccctgctaggctaagctgagaaccgaggttcagagaaagtggtgtgatttgtcccctgcgtgatggtctccaagaccacccctaggagtggtgatttgctaggggaactcccaggccttggcagtgagaggagagagacaaggccagaccagctgagggaaaggtgcggggagtgaaggctggaggagcccgggctccagcttccagaaccctctcccggcagagccacacggcacaggcctgattcctctggcatctcatgatgacacccgtgaaacaccgtctatcagggaaggaactggctgcacaggctccctcgccagacacacaccaaaactccagactctcagaaggccagcgggtggtcgttggcatgaatcatgtggtttgcacaaacagcaaaggcacactgagccctgcttctcagttagggcgtggggatccccccccacaaacccaagttcgcagacgccaggcaagcaggtagcttccctgcgagggcaggccggcctctgggtcagcacctcaccagggcaccaggccaaacccttccctgctctctgtcttcacatgcattcccctctccctggcacgcagcaggcctggcccgatggtgggattccggtggagctgggtgtgcaccaggtggaccgggagggccatggccagaaggaaatgctcgccctgttcttggtgttgagtcgtctcctctgctcagcggagtcacctctgtctctttgcccctatttgtcgttgactcactgcagcctttcctgcatggaacgggaaagagggtccccacttctgaagcacataggaaggggcggctcccctgggaacaggggctgtgctcctcccagcctccagaacctgccaatctccgttcttggagctgacaactcccagcttggctaaaccccagcagcactgcgaaggcttctccacttggaacaagcttggggggtgagtttctccagctcatgcactccccccgagtggttatttatccccaaagtcattccgaagattcatgggtaagggctttcagcggcctcctattccccgcagatgccagcctgcctggtggaacgcggcgctgctcctgcaggagtggacggcgttccatcttcgccaccacacccgctgctccgtccctgcccctcggtcgctgttgcatattaagtgcagggtgcccggcaggcctgccaaggccttttcagggcccatgtgttctcaggggagatgaaaagcgtgaagcaggcgtggtgtgggttggccttggcactgcacccctggttccaagcactgagggccccctggaatccccctgggaagactgaaggcccagcagaccccactctgtgcggttgcccctactctgacactctcacccattcctaccctgactcccacctacctcccccaactcttgtttaaacaattaggggtgaactgttttcggccattgggaaaaggaggctgcagccgggacaggctgctcagcagcttttgttctgctcaagagcagggttttcagaatcttggtgagggagtgtgtgcttaatatgccagtcagcgaggctggacctgagtacccagcccagcccgccgccccttccttggccaattggctgagaagtgggcagttggaaggggggtggctggaggggggtggagtaagccaccatgggaacccaaggtggccgcctacctgggcccagtgagctcagagttcagcaagcgtggatggggccgagggtcctgtctcctggcaaaccaatggggtgtggacagtgagagtgggcgggaggctgggccgcttcttcccccttccccctggaagctgcaggagcctggatgcaggtcccttctggtcccagtcacctccctaccctccccagctggttacctcctccaacagggtctctttgggtagaaaacaggcaaagccacagtggtccaccccccaccccggcttggcttacctggacctggtgcgccatggatgtggacatgcggttctcatccctgctgcacaccggaggtggcctggagctccttgctcctccgggatgcccgtttcaggactgatatggaatttttctggtggaacaattaggttagcacagtctgatgtaatttctttctgaaataacttgggctttagagtcagaaagacctggattccactctggctcttgctagttgcgtggcctcggatgattcctcagggtctttggtttctccatctgtgaagtgggaccaatgttagtgcctcccagtgcaaggtcgtggtgaagatttcaaatgtgcacagacgcgagagtgtcagccattgctattggtggtggtggtgttatggtcgcccccagctccagtgcccagagcggagcctgatgtggggcaagcgcttggtgagtgtagaactgaaatcagtgaccctctgctgggtggagagatgagtcccagcctggggtttagggacatgggtgctgtccctgccgtgaggagtgaagggcaggcaggacaactccccctttacagatgaggaaactgactttcagagatggcaactgacttgttcagggttgcccagctgggctcaagtgctaagagtaaatgcaatgttgcatgtcacagactggcggcgtttggtacccagccttgccgtgatactcccggggtgcattttgccttgatgcctggttctgtcagtcagaaagggattgtgccaaatccctgggtatctgggaattccctgagactccagtttaagggggcttcatgcaacttagcagtcattccacactatgcaatttcagtcctgggtgagtactgacagcagccacagccgtgcagaaaatgcacacgtgagtgctgcatcattctatggcctgggtcctctgtgtcccaacacatgttcccctggattctgggtacctggtcacatccatgtaaggaacccccatccacctgtgccctttggcactctgaccaaacacatccggatccctccagggtgttattatggcttaaatgaacccacagatctcacccagggcttaaatgaacccgcagatctcacccggggcttaaatgaacccacacatctcactcggggcttaaatgaacccacacatctcacctggggcttaaatgaacccacacgtctcacctggggcttaaatgaacccacacatctcacctggggcttaaatgaacccacagatctcactcagggcttaaatgaaccacagatcttgtctgtggctcaaagccaaagtgttggtgccagggactggggtttctgttcccatgttgccttgggcctttgctgctctaatccaaaggagcagtgatgggaagagccaggtagcatctggagggagatggggctggggaatctgcactctgagatccgagccttcccttccctggtgagagatgctcctcatgagctgtgagcgtgcgctttggatgtggagtgtgcacacgatggccatgatgagggcctggaactctttcgccgtgactcggctgtgccttccaccagcaactctccacctccccacagcctcctgccatctctggaggcacagtcctccctccgtccaggctctacccgcttgcctcctcctccagggtccccttccttattccccagctagaagtgggttcctctccctcctggccctctgtgcctttacaggggctcaggaagtgtctgcataacaagccaaggtgagaaggccagtgagatgtttggtgaggggagcagtgggcctacctgacctgattaggccttcacatgtccacagttgctttctgagcccaggggtcaccaacaagaccccaggtgtggcaggtaggagcacgggagtgtggtgtggcctgagtacagaattaggaaggcttcaaccacccatgatgtgttttcattgcagcccaatgtgactaagaattacatactgtaaacggatgtttctatctttaatttttttttttttgcctttattggaggctttactgtttctgggtaatgaaatccattatctggttttcagtggaatacttagaagagaaaattattggaatgaataaacaatgcaatatttgtacctaaacattcctttaaaatataatgaaaaacattttgtcaacacttgcagggttttggttgtttggccaaccataaacggcatcgtaaaacaaagcaaagaagcaagtttgttaatcttcatgaggactattcctgtgcgttttctgtggaggatttggaacataaacagggcgtgttagggttgctggagggacgggaggggcagcgctttttgttttggtggatgtcaaagccaaggctacgagagtgctggaggtgggcagcggggcgcggcctgggggacctggcgaccctggcgaggggcctgcttctttgctgagccccagctcctcatctttgaactggggatgcaggtgatgtttcctggggaagccgccttggaggaccactgcgtggtcagataagctggtgggtgggaaagtgctgagcagaggcggaaggcctgcaccctggtgacagctcccactcagatcctaggagggcgcgactctgtcctgtcagcaacgggatccccccaaactccttactccatgtatgacaggaagagtccctctggggaagggacagccctgggaaggggtgtcaagggagcagggtgtcttccccacctgagagccgagccccatcatacacacagccccgggggccatgggtttcatgaaaggtctggccgggcctgagcccggatcccagcttagccaccgactgtgtgtggcccccctaccgagggaggctacacaaccccaggctgctctcgggaaagctggtgattccatgatcgcatggggtccttgcggggctcagctgagaggctgtgtgtggagggtgttttgtcagttggagagtgctctacacacgctaaggttccaggccggcaactccttctgcaggtgtacaggtcaccgtgggggggccctgggatggattcagacattataatcaccacaccaggtgcgtgtcctagctgtgtgactttggtcaagttacttaacctctctggacctccaattcctcatctgtaataaagaagatgatgacctttccgtgccagtgtcctgtgagaattgaagacagaatctgtgaagtgcctggcctgccaaaagccttctggaacagtagtgatgatcactgtcatcgtgtgtgaccctgggctgtgtgcctgtcttgtctcattctcagttttctcatctgtgaaaggacagaatttgactagtctattttttaaggtccttgttctttattcgattttattcctctttccgggtgtacactacttttttagtaattataatatttgaagcccaatgctttaatcagactttggcaaaaataactgatcaccttaagaagacaaatgttccagagattggagaattccattcgtggcctgagaaaggctggcttctgtgttaggccagggtatgaggatagctcagggggtgggaaccctgagagcttgtgtctggcactgtagggatggggacttgatgagccattggattaggccagcagggttttagccagaagtatcatgggccccttgatttttactgtaagtcagtttggcactggtatgtgggattatgcagtttgtatcagtcaggataggtagatagtgctgcagtaacaaacagccccaaatctcagtggcttaaaagaatcatattctattatctcatggttatatgggttaactggatcccctgaatagttcttgcttgcttgtgttcagatggtggctgggactggagtcctttgaggctcaaccgggctgggtgtccaagctggtttcttcactgacattttaagtacctgggctggaatggctggaagagcttgggactggctggtgtcactctctctcctgcagcctcttcatgtggcttgggcttcctcacagcatggtggtcccaagagtgactgttccaagagtggaagtggaaaaaaaagtggaagccacctatgtcttaaggctgaaaccagaagctggcacagtgtcccttcagctgtcttctgtgggccgagaagttgcagagcaagcccaggttcaaggggaggggacatattcaccttttgatgagaggagtatcagagaatttgtggccatccttactgtgccactgtcatttgtgagggcttctagggcgccaggtccttgtctaggggcttttctgtgtcacttcattcatgcctctgtgacatcctggtagatgggactatcacagtccccattttacagatgaggaactaaaggtggacggggaagtaacttgctcaagccctcgcacaaagcacgtggtggagctggattcaaacacagaactcccttcccctcctgcggtattgacatgtgcagtatagacgacaagaaaaaagatgccaggacccgcaggtttcctctctctggtaaaagctggatttatccactcagatttgctctatgtggcccctgagcagggcccacggtgcgtgtgagcatgccctcagcaggctgaggcaggagtgagtcttctctaagaaagaggggtaggctggacgcggtggctcgtgcttgtaatcctaacactttgggaggccgaggcgggtgaatcacttgaggccaggagtttgagaccagtctggccaacatggtgaaaccccatctctactaaaaatacaaaaattagccaggtgtggtggcatgcacctgttgtcccagcttctcaggaggctgaggcaggaaaatcacttgaacccgggaggcggaggttgcagtgacctgagatcgcgccactgccctccagcctgggtgattgagcgagggctctgtctaaaaagaaagaaagaaagaaagaaagaaagaaggtgaaggcctgcttccatcagcaattctcccaccacctgggcctctttgtctttgaaggtttcttttctgcaggctgctctatgcgtcatttaaaaaacccccacggatcccctttaacgggaaacacgctggctcttctggtgtggtttcaagtcagccagcttattccagagacatttcgttgtgagtattaataaaaacaacatgcatttttgtatgtttccatagagactttccaagatttatgtccctgagacatatcgttggatcctgtggaataactacgttcccagcgtcccgtgatattctgcaggtctccccggctgagaggcagatgttgaggccatttgtgtatgaacaagaaaaggacagactcaaccggccttggggtctttcatgtattcggggagtgcgaggtgtcagggtacaaagaggcgaggccgaggaacagctgggcaggcagcgcttttgcggctgcagttggggctgcttgaaagtggactgtgtctgccaagaacagtgggttccctttcactttgttacttaataggagaaacccaggctttcgctgaaggcgagaagaacggggccttttaatatggactcgttgccggaaccgccacgacaccagggcaggctggccagtgggcgcagggccagccaccagaggcaacgaggaattctggtgaggacgctggagtgggcattaggagggtagaattcttgtccctgtctgccaccaaagactgggtgacttgggctaagacagagctctgtgggtcccagtatccttgtctgtaaaatgggtgcattgggataatagcctttgatttgcaggtgactgaagcccaattcaaagtagcatgagaagaaaagaggactatatatgactttgcatcatggaaagtttcaagggtagtggccagcttcaggtgtggcttgttccaggggctcaaacaatgccttctgagctctgcctcttttcttgctctctggtctctgctaagggatttgctctggaggtagtaaggagtcatcataaaattttattagggaattgaacaaattttttaaattaaaacaaatatacatacgaatattcaaaacgtggagagagggttggggggaccaggactgattttcaccttgtccagttgttagaacatctcacattgtagtgtacaggagggctcactgtaagccgtaatgtgctgttctcaagactaggagttattgcaacatgatagcaagcaagtactggatcaagatgaccaggattctgaccttggctctgacactttcacaggttctgtggctctgggagggagtgcgctcctgcctaagcctcagtgtccctttgggtaaatgggtatgataggatctgccacactcccaggcatcacgtctgcattccaggcaggaagaaggggatggggaggtgagaagtcctccagagacaaggttttttaaaaagcgatcccagaacccccaccatgtgactttgcttatgtcttgttggtcgcagctggatcacatggccacctctacagctcctttggagtccaggaagcaggtgtctcagctgagcacattgcatccgggacagaattgggtttgggtggcaaggagaaaggggaaagcagggactgggcatcccacattctgggggcaggacctaatgatgacagcggccagtacttatgacacacacccctctggctgagcctcctctaaacgtatggtgccagtcatatcacttgcaaggtggaaaagggtctgggaaggcctcgagtcactcaactccctgacccctgcagtaccaccctcagcagtgagcccctcacccctggcctgagtcatgttgcagagctgagatactacctggcatctggggggcctcagcacttgtggaggctggggagtcgccaaggaggcccgaggcaggagagtgggagggcagggtcttccagagagagggtgagcaggggctctgggggaggaaactgcaggaactgaggggccagtgtggctgggagggagggcatgctggggccaggtgtgggcaggatgggcccgggtggggcagggcagagctcaggggccggcagtgcatgggtttagagcaaaccgcaagactctgggggctggccaggagggtggtccgtgcttctcacccccttctctttttttggaatgttcctatgatggttgaactttttcattgaacatgtgttacttttataacacaaaagaaataatagagtgatttgacttttgaaaataaaggctctacatacttccccaaatgtctttgcaccagacagcgactctttattagctccaccttcacaagccctgagtgaccgtgcaattcatcacccaaaccaggatgcttctgagaggggctgggggtgcgggagggattggcattgtgccggtctgacaggcgtcagccaggactgttgcaggcatggagggcccttcctcacctaaaccccaaacagatgaggcttctaaaaattattatagatgaaaatctccaaccagcctggttcctcatgagtggcaatccaaaatcattattgcattccgtttagaaaaaattgaaactgtcgaatggaaaatcccccttagctggctgggtacgtggcgttatctctgttccccagatggagcctcaggaagctgcatgactgtcccagctcagagccagcatttgggacagaggccacagcttggacccctgacactgcctggactcagcccctgaatcccccagctgggctcagccccccatggctggtttttcctaattcaagaggcacctggaggatcaagggtgtcctggtgatcacaaagcctggccgtcccggcctttgaggtctcctgagcagccgggctaaggatgccaggtcttatcgccatccctgtctcagactcccttgtccccaggagccctcccaacaaggtttgctgcagggacaacctgagcctcgccggggaggagagaccctggggcagctctggggtccagggccccaaggctccatcctgaatctgtggccctgtgtccctgcctgcctctggtccattgcctatgacatattcagtttattctgagcagtgacacgggccgtccccctgttctcattagggatctgtagctcattccaggcccagcgaaggcactacagaagagggatggtgttccctgcaggggtgcacgaggacccctctggtgcctgcctttgttcccccactgagtgccggggcggaggaggtgtccagggggcaggtggccagggcgcccccagctccctcccagatgaggtggtgtcataggaaggattcaggggcccacagggtcactggggaggaggtggcatgagccaggctgtgaaggcagtgctctatggtgagaggtgcccagctcctgaggggccagggaggatgtgctggcaaggcagcccctccaggtgggcaggaggcccctgccttgcaggagggtacacgcactgaatccacctcctgaagaagtcacgggattccgtggatggaatttgcctcttcctgcagctaggtgctggttccttgtgacccgggtcccaggcagctttgttctccagggtaagagttatatgaaaaaaatctcagcattgctcttcatcagagaaatccaaatcaaaaccacaataagatatcatctcaccccagtcagaatggctagtattaaaaagacaaaaagtaacagatgttggcatggatgcagagaagagggaactcttaggcaccgttggtgggaatgtaaattagttcagccactgtggaaaacagtatggggatttctcaaagtgctaaaaatagaacaatcattagctccagcaatgctactattgagcatctacccgaaggaaaggatcagtgcatcaaaaatatacctattcgtatgtgtattgcagcactgttcacagcagcaaagatatagaatcaaactaagtgtccatccatgatgaatggataaaggaaatgtggtctagacacaccatggaatactattctgccataaaaaagtatgaaagcatatcttttgcagcaacatagatggagctggaaatcattatcttaagtgaaacaagcaaggtacagagagtcagatatagcatgatctcactcataagtgggtactaagaagtgtgtgtccatggacttatgagtgtggagtgatagacagtggagactcggatgggtggcaggagcatgatgacaagttggtcaatgggtataatgtacattatttgggtgatggatacacccactataccatctatgtgtataacaaaattgcacatgtgccctataaatctgtacaaataaaaaggaaaaaaagaggggcgggctgacacccagggccttgggaattccatggacgtgactttggatgctctgagcagtgctggctgtatgggcttgggccggtgactgggcctgcttggacctcgggttctgcatcaggaggattctaataacagtgactgtgcagtgctgttgagagcagagtctctcacatctccatgcacacagcccccggggacctgtcagagtgcagatctgactcagcaggtttgggccggctgtgttcccatgaggtcccagggcatccgatgctacatctgcagcccaagcatgggcaacggggagagcatgggtgggaggtgtctgctgtgcacagatgagtatgtgagcatgtgtgtgagcatgagtgtgtgagagtgagtgtgtgagcgtgcgtgagagagtgtgacagagtccagaaggcaggaattggctttctcaagccttttcaggcttccattcacccacccattcactcagcaaggcactgagcggtcaggtcaggttcctgccctagcggaggtgacagtcccatgcagaagaaggcaagtgtaaccagtgcttcccgggcagtttccgtgggccttgggagaatctaacaggtggctaagcagggagagcttcctggaggaggcggctttcatctgggacctaaagggagatccttgttcatcttcatattgtgccgtagttcctggcagacgcaggagcctcagtatgaatgggctcagtgaaatagaactgaagtgagttggagcgaattgtcagggagtgtgggaggcaggaatgggagatggcgttggagagagggtgtgctggggaggcggctgtgatgggggtccagcccttctgagtggatggattgcttgagcctgaagcctgatgccttctccctgtccacgtggtccagagacaggcctgagttccggggctcaagaagctggttagcctcgtcttctcaggcttggatcagaggtcaggcgggggccggctcctggggagcttctgctcacagccataactgagaaaccatctgttccaatctttcatctaactaggcctgtggtgttatctgtccacctgccacagacaggccagggcatgccctgggcagagcggctgtgcagtggggccactggagccccggggttggagcgtggggacccggggttggtgcgtggggacccggggctggagcgtggggccccggggctggagcgtggggacccggggctggagcgtggggccccggggctggagcgtggggacccggggctggagcgtggggccctggggctggagcgtggggacccgggattggtgcatggggaccctgggctggagtgtggggtcctaggtctggccccactggggctggccttgctgggcaggtcgtgctgtctctccaggtctctgcctcctcacttgcctagggtctacaaactcggacctcttcaggtgccaggaggccatgggtgtctggggcaagtgtcctgaagaacagccctggggcagggagaggctcttgagagtggggagagcgtgcctggtgagcacatgcccgctcagaggggacagcacttctttgctccagccagggccgccacgagggaccagggagtggcatttccagatcttttgattattctagagaatctggaagtctgtattgtagggggctttcctggttttaaatgttgacaaccaattaaaaattaaaaaacaaaaaacaaaacaccatgtgtgacaaataaaagccacctctggccgagacttggctcctcagatggcagtttgcagcctctgggcaggaactctaaactgtggggatatattcagtcattcattcactcattcatttattcattgaatacccacaaatgcaaaggcccttgctaggaactgggggattacagagctgaactggaaatggattatgccctccggctcggagcccgggaggcaggaaaaccccaaatctcggatgcgaacgtaatgtggttaccatcaatagtgggggagctgtgacagctaagcctggcagaaatcagctgcgtctcgcatgatggggggttgggactatgggggtgtcgggaaagggggcgtccagcatgagcagacatgctgggggcagagtgtgaggtctgttgggggaagagtggggagctcggtctggcagagccggatagggctggatgggtttgggatccaagtgaattgaatctccaggcagagtgtgggcaccggccccagccacccattcctagcatcctttggatgtaggtgtcatcggtagagactcgggggtcattaatttatggctcctgggcattcactggtgatttgagaagctcaataggaacttctcagtatttctagaacaggacaagttttgctattttaacatctgggagacctgtggggcaggagagagagaagggatattattagaatgtgtgaatcttggccgggctccctcgggccctggagtgggcaggtggccagaggacagaagtgatatttcacacagatggtggcctctccaggcctctgcaaaccagcaggacggatcggcggtgaggtgaggctcgtgtgcctggcgccaggagtgcccaccaagaaccttaaatgggtgagggggctggttttgctcagcaccgaccttggggaaggctgtgtgagggcagggagacccaggcctgggggtggtgggggtggggaactccccggggctccaagagaaaccagtgtaagtatggaccctgagaggcggcagggcagggagagcctctccgcatcgcgatggtcacagtggctcttccaggcagggagcccggccaagattcgcacattttaataatgccccttctccctctcctgccccacaggtctcccagatgttcaaatagcttgtgtcctgcacactgactgagagtgtgtccttgacaagtcccttcacctccctgagctccaggcttgtcacccgtaaaaggtggtgacaggaagagaagtgcacatgtgggaagctcccgaaaggtgccatgtgctctaccccatgtgtgcccactctcctctggcctcccccagccccttgtccttctctgcctgctctgtgccctggaggtgagtccacagcttgcttacctggcctccctggccctggcctcccattgggttcagtcaacgagaggcgccgacaggagatgggaggaaggcgaggatgggggatgggttcctgcaactttctctttgaggtctggggttgctgtgtttgctgctttcctctgtccacagctccactggccagccctggcccatggctacagctctcacccgcccaggtacctctgctctgtcctcttcctccttcagtgttgggggagtggtggcttccagcaggggcggagtgcttccgctgtgtcccctgctgactccttggctctgtccacacctctgtgattatccctttctttttaaaaaaatttttttttaaaattatactttaagttctggggcatatgtgcagaacgtgcaggtttgttacgtaggtacacatatgccatggtggtttgctgcacccatcaacttgtcatctacatcaggtgtttctcctagtgctatcccttccctaacaccacacccaccgacaggccccggtgtgtgatgttcccctctctgtccatgtgttctcattgttcagctcccatttatgagtgagaacatgcggtgtttggttttctgatcttgtgatagtttgctgagaatgatggtttctagcttcatccatgtcctgcaaaggacatgaactcattccttttttatggctgcatagtatcccatggtgtatatgtgccacattttctttatccagtctatcactgatgggcatttgggctggttccaagtctttgctattgtgaacagtgctgcaataaatctatgtgttcatgtgtctttatagtagaatgatttataatcctttgggtatatacccagtaatgggattgctgggtcaaatggtatttctagttctagatccttgagaaatagccacactgtcttccacaatggttgaactaatttacactcccgccaacggtgggaaacatcctctccagcatgtttcctgacattttaatgatggccattctaactggcctgagatggtatctcattgtggttttgatctgcatttctctgatgaccagtgatgatgagcatttttttcatacgtttgttggctgcataagtgtcttcttttgagaagtgtctgttcatatccttctcccactttttgatggggttgtttgtttttttcttataaatgtgtttaagttctttgtagattctggatattagccctttgtcagatggatagattgcaaaaattttctcctattccgtaggttgcctgttcactctgatgatagtttcttttgctgtgtagaagctctttcgtttaattagatcccttttctctgttttggcttttgttgccaccgtttctttaaattctattaaccatgtggtttcttgtgcagagcctggctgacacagatgtatctcatttaatccttaccatactcaattaaaaagtgatgcaatcatcctcattttacagacgtggaagctgaggtccgcagagttcaattccatgactgggggatttgaacccaggttgtgggactcaggatctcctcagaacccacattctcaagcacagatagaatcacggggctcacaggggttgtactctgtactcgtaggcccagggtatgtggcaggtgtttgagaaatggttgctgtgctgagggcgctcttcctggtgagagcactgtgctttccctggaacaggagctgtccctgacgtcaggcccaggggtggcccttggtgtggcccctcccaggagccctcttgctcctcatgccctgtccaggccagcccatcctttgatgtagcagtacccgcctcccctcctgcctcccgccctaccttggctgtgcccgaggaggaggtggtcataggccccacgctgtcttccatttcctgtttctcttctagtcatcatctcattcacacatcacatgcccttggggttcacagcatctccccatcttacagatgaggacctgagactctgagaggagaagtcggccccctgcactgctgtggatgaggtggaggactggagatttgctcatgcgtggagctgacgccaaagcctgtgtgttcaccattgggccacccagcctgttgggcaggacagagtttcctctgacagcccaggctggtgcaggcaggggctgagggtgatttgggggaatgacagaagctcctgcatctgcgctgctgctgcccaccatacccctctcactcccctctcctgccctcccaggcttgggttggagaaaggcagaatagagacaccttctccccttttccctttcagaactcggcagccaagtgagaacccatgtgtgggaacttttcttttccctgtgggtgtcaggggactgggcatccaaagaatgggtaggaggcagctgctctggatgcccagagccttctggccagttgccccctgaggggctggatttcctcctctctgtggccactcaaaggggtctgctgtgtgggtttatcataggagggtcagaggagccacacttactctctgcctgggctcctctatctgcctccaagcctcctcccacctcccccctcccaggaatgttgagcaacaaattgctatgattgatccatcaatggattgactgatgggctggtctaggagtcactcaacaaacatgtcatttgctttactgactctgggccagtgggcttttaacagttgtttgtggaatgaatgaatgaatgagtgaacgggagctgtggttactaccccaaatgatcatgggctgtgttggaggtgacatgccaaatatgggaacgtaaaccaggtaggaaagctctctgcctcttaagagacacacacagagagttaaggggcagcttcaggggaaggaaagtcagtggcaactcagggtggtaaggagggcagaaccagagagacttcctggaggaggtggcatttcagcagggccttgaaggcccactagcgctggagacacagtggtgaaagccgggaagacatggtgtgaccctcttcctcctgctgctgctcgtgttcttacaacctcccccgagcagggtctgtgagccctttcacaatggggacaccgaggctcagagaggtggagagtcatccttgaggcgctcatagcactgaacttagttgatcacggatccctgttttgttgttgtttttaccttagagcactcgtcaacatctgtcggatgatgcttgggaaaagccatctcagagaattgaagttctaacttatggtcatgctggctttcccctgtatggtcagacactgtgatgggtgctggaaccagcctgggaattctcttgctttctgtccccttatgaccttgtataattggcaaatgtcaacagctctgtcgtctaacattacattttggcaggcaggcgtttgatccagcttgtggaggccagaggggctggtgattctctcgagagaatttggagacccttcaaagggaagagacgggtctcccagagcagcccagacagggctctgcgacggccataaatgtgtcatatttagctctgtggtcaggcagacggtgttgcttcattagtaaatgtgctgtttgtctgccatgcctgcgtggccaaggcatgagattatatttactgaatgcaaatcatgccatggacatttatttctctgccttgctgtttactccttcctttctctccagcccagatttatgaaacatatggatcctctctttaaacaatccctcaaaagccctggcttgcaaattagttccttgaatgatcagctgtacatatcctgcatttaataaattcagttattaaggaagctgcaattgattattcaattacagcagatcgggaatcaggctgctcggcaagctgcctgaggcactggattgagtactaataaaaggaaaaaacacctcgggaccggcctttccaccaacattccctgctggtgagagagctcagaggctgtgccctgggctttgcctggggaaggggccctgtgggcatggtccctgatgccttctgactgtaaagaaattagtgagccagatgaccgaggatcctttccatgtgatttgtgtcgactgggaaatttgcattatgtatgaaatttgccatttgcatttcattctaaggaaaaccctgaacaatattgataaatacattttatgtgtatacaaaatagatttgagcaagatatgggggttctgggtgtggaagtgtgtgtgatgaaattagctttgtaaacatggcattcatacagggggaagataatggaggtggcaaaaggtctcagcagaaatgaaagatctgatctgcccatctacccatccattctcccacccacccacccatctatgcatccatctatccatccatccacccacccacccatccaccaacacatccatcgattcatccatccacccacctatccatccacccacctatccatctatccacccacccatccatccatccaaccacctatccatccatccatccatctatccatccatccatccatccatccacccacctatccatctatccatccatccatccatccatccatccatccatccatccatccatccatccatccatggcctattcctgtaggccactgcttaagcactgggatagtgtggtaacaagacagacataggcccctgtcctctcagagcttccagtgtagtgtggaggacaccagatgagaagcaaatcaacaaatatgattcccaggtaattgctggtagcaataggttctattagggaaatatatacaagatgatcggcaagaagctgactggggcactttggtgaggggttcaaggagggcctctgaggagggggctgggagtgtgcagccatcctgctgagggttcccatggggaacactgggcacactgacacgacctccacacagccctcagcagggactccctttccatgcctcctgggtcttgtgtgccttccagccaggatttaggcactgctttttctttaggctgtgtctggtgaaggtggagggactcaggacacagcccagacattcttgggaaaatcaccgcagggctcagacggccaatgtgggacctcgtggtccaggtttgaggagctctgggagtcctacgactgaggtctctgcccagtttggtctcagggactcatcctaacagtttatatgcctgccttctgcttcccgactgctgcagaggaaagaacaggggctttggaaccagagacctgcgattaaatctggaatcatgtcaccccagtgagccttggtgtctttacctgtgaaattaccaccctccattcctcatgggcaaatgcaggtgtgggaagtaaccagattgttttaaatactcaataaatgacggttgtattagtaataagaggactttgagtcattgttgaaatctgtagagaggtcacctggtgtaatggaaggaaaatggactgagagttgggaggctgaggagtcccggtcccctccctggtttccctgaactcacctgtgaaaaagcccagcctggaggagcaggaaggaccttgtcaaagaaagcacccgtcattctggttctgtgatgctggtggcacaggctgggcaggacgctggccgggtgttcatcatcgtctgcctcattgtcctgggaaggagccgggcgtgtccgacctgattgcgaacctgctgtgtgtgtgaacttggtgtggagttcccacggactccttcctggctccaggttctcctgcatttggccaagaagccttgttcagcagctggcttcagctaagcccgtggtctctgctgcctgtatgtcaaagtggctggggcacagggctgtccagcaaggctgctgactctcctggggactgctgcttggcaggctcctcctccatgctggtgtggggctggcaagactccactgtggacacccacctcatggtgtctcaaaacagccagggctgggcaagtgccttcatggtcaagttccaccccgacgtggacactggttcatccacggagcttgctgggcaccatggaccttggtgcgtctcgttcccaccgtgggccgtggtgttggcaagctggtgaacttcattcattcactcactcactcattcactcactgactcattcattcactccctctcctcacatgtcctgaggatccagtgtgtgccaggccgagtgccaggtcctgaggtcacagaggcccccctccctttggatgggggagcagagaagtagagagacagtgaccacacagggtcactgcgctgaggttacgggaagcagtggagactgcgggactcagaggtgaaatccctaagtcccctgcctaagagatgtgattggctgggggcaggttctggcagatgtcagtcatcagagggcaggtatttctccagcaaagcgagaagagaacagacctggctctgtgcagcccatgtcccgcacctccctcagcacctgggtgcctgtctgtgcagtgaggggttggatgccctgatctcctagaccctggccctctcctgcttgtccaggggcatgggatgagtgactgcaggtgtgggcatctgtcccctagctggcctggccttaggtgtcccccaaagcaccaagctgccaccaccactgcctggaccccgtcgagtgtctcccgaccaccggctatccacaggaaatcacaggtgggcactcagcccctggtctgggaaggcttctccgtggagtgatggtgaggtgatgtccttctcgggaaggtgctgtgtggcccgtttaattgagggtgctgttcttctcctgtgattgaaactaggcggagctcttgccggccctggggcattgggtgctgggagcaggcaggggctggcctccctatggaaagcccctcaccatgcctgggtctgctctctgcagtcctgacccccactcccttccagctgcaggccagaccctgagggtgcaggggagatgcaccctctccgtgcagccctgctgctggctggagccagaggcccccggcgatgtccagtcctgccctcaccctgccatgccagaccccagcctgaagctgctcattcccctgcggtgcccgcctcatgccatcattcccgcctggccgctcctccagcattgctgtccctcagaatccttcccaggccctgacaccagcttctatgccgccctggcgccaggcttccccgatgcctctggagttggggccatgctctgcatgggacttctgctccattcgggggtgtgttaatgtcccgtggctgccgtaactaaggaccacagactgggtggcttaaaacaacagaactttattctcccacagtcctggaggctggaagtcagaaagcaaggtgtaggctgggcacgatggctcatgtctgtaatccaagcactttgggaggccgaggcaggtggatcacgaggtcaagagattgagaccatcctggccaacatggtgaaaacctgtctctactaaaaatacaaaaattagctgggcatgctggtgtgtgcctgtggtcccagctactcaggaggctgaggcaggggaatcgcttgaacctgggaggcagagggtgcagtgagccgagattgcaccactgcactccagcctggtgacagagtgagactccatctcaaaaaaataaataaaagcaaggtgtgggcagggctcgttccccatgaaggctgcaggggtggctcctgcctctcccagccactgatggctccagatgttcccaggctgcagtggcatcatcccagtctgtgccctgtggacacacggcctcctcccctgtcttcttgtctgtgtctcctatgaagacattcatcgctggctttagggccgcccagtgtaatccagtgtgagctcatctggagatctttaatcacatctgcaaagaccccttttccaaatgaggccacgttcgcaggggcaggtatcaggacacggacatctcttcctgggggctgtggtgccgtccactgctgggccccattcccttcctgcagagggaggggctggctctgctctctgtttgcagtccccaaattcagcccaggaccagggctcaggctgaagttgtttgtcgaaaaacagcctccggctcatcctcctccacttccccagactcctactcttcctccgtgtcatcctacctgtctccctgttctcctttcccggccctgcacttccacaagactcagacctgaccctaaatttcccttttttctggagcccgaggtgtttcttgcctgggccctggtgccacagagctgagggacccttttctgtccctcacgagttgggtccagctcaccccaaatcatgagctccctggagctcccagccaatagggctgtgcaggccagcgggtggcctggcctgggagggcacagcttggtggaacaattcagagtccctccgtggaagttgggagaagatgctggactcctctggtgaagtgtcggagcttcctacccgagccctggcttgtttcgggagcagctgtgaagggagtggagggctgaagcgcccctcatttccgtcctgccctcctcccttctttctttcaggagacccgttgaacaccttccctgtgccaccttctgtgctctgagctttcccgggatgtctctgatcatctccagggattttctgaagatcatttgggaacagtagttcctacccaaagcatctggggcccctgtctttactctctccacagcctgttagctgtgagtcatccattcattcatcaagcactccggtggtttcccacagtgtgaggatgaagcggactcagccctgccctcagcattcctgcaaggccagctcagataccccctcccccaggaggccctctctgattgcccagcatctatgggaacgctgcctctcactctgctgctttggacctcagctaagactctggccacgttctgcctcagtggctccagcattgctgtgctaagcctaaaacaccagggtcaggctgccgggctcgagtcccagctcggccccctgtcgccacgccataactgcctcccagcgtgtttcctctgcagacggtggctcatcacagtgccagctttttgggcagtctggaagaatcagtggggggtgggggaggtgtggcaggggagggccacagagagggaaggaagccctctgaacgcaggctgctattggtaccagcctggatcgctgcagcccccacaaagcacgaaatagtttctcaataaatatttattgcatgaatcagtgaatcaaactttctaattcagcggaaacactatgaccaccagggacgggacagacaagagtgatgattagagatgagtaggcatcttcctttctcctaagcctttcttacccttctggtataactacttcttccctgttttacctaagcgttaaattcgtggatgctgattttcaattcttagcacaaaacacctgcttacttgagggcagagcctgggagatcctggagaaacccccgtggtggtagagtaaggacttgccgcagctccgaggatgggtcgagtagggcgtctatttccccgcccctacccaagcaggctggggcgaggtctctgcagatctcctcctggccaccccagccctggcccgtaagcagaactcgctggatacatggaggaaagatggaatggatgacaacaccagctcagccagccaggcaccgtggctcatgtctgtagtcccagcactttgggaggctgaggcaggcagatcacccgaggtcaggagttcgagaccagcctggctaacatggtaaaaccccgtctgtactaaaaatacaaaaattagccaggcgtggtggcaggtgcctgtaatcccagcttctcaggaggctgaatcagggagaattgcttgaatctgggagacggaggttgcagtgagccgagattgcgccactgcactccagcctgggcaacaaagcgagactccgtctcaagaaaaaaaataccagcttgtctgggtcatcgggggtctgtcagtcaacccgtcagtgagtgatgagacgagcagctcctgttgtagaatgaggtgacaatggcacaggtaggtgacctttatgctcagggaagtctgcacaccttgaggaagctggagccggaagatgcaggcccgctggtgccggctgtgtggggtttggggtttgtgggtggggttctggttgtctacacagcctgaggtgtgaactgagtggtgggccccgggcccctggagctcccttctccccttgtggggcagtccatggccttggaggatccctggattcagaggaccctctgggctgaattcattgcatctgtgagagggagctgtaagtaagtgggagtgaagggatgaaggtttctgtcctttggtgaacatccctgtggttcctgccacattgtctaaaggatgcttccttgagtttttcaaccctttaccttagtggggagcatgtggggagttgtcaaaggccttttcctggaaagtaattgacaaggagggagacagggagcttcctgtcggccacttaacaatccctcaacccctctcccatccctcgtcatccagcatgcaatggggccgtcaaactgaaggaagctgtgccgatggccaccccagatcaggtgccgtcgttaatgaggctgccaggatcaggcactgctgttattagtggtaactgcaaacctccgagggcccatgtgtgtcctgctgggtatcaggggccatgcagacagtaaagcccagggcagcctgcagggctttgcacacacgagtgggtgaccacctgtgagtgaagggagtgcccagggtggagggagcataaaggagacaacaacctggccagggagtggaggaggagcagggagggcttccaggaggaggtgatgctggaactgcttccatcttaaagcaggtgcagcaggtagcaggcccatgggcatcccagggagagggcctggaggggacctcagcttagggtgagtgagatgccacagatggaggaggctgatactcagggcattttaggattgagtgggaattcataaggcagagggaaggagggaggtggcaggactggagacccaggctccagggaggaggcctggcctgggaaggagacttctagaagcacatgggctggggcctggtggttggcagagcgggggttgaggttgacgggagtaggtctaggagccccacaggcagccgattcagcatcagcgttgcagggcgtcacctctgccaggccctgtgctgtgctgggctgggcaagaggcctgagggcctggaggagcttacattccagtgctgggatgagggccggtgatgccagggtgctggtggtgtcccaggaggatggcactgtcattctctggaacagcaaaggtcctgagtgagacaggcaagtgaccggcaggaagggagctgccgttgtgcagggccgccagggcccccggttgcaccatgacatgcggccaggtgatgtgtgttgagggtttagtggtgtcctccaaaaagagatgtccgtatcctaacccctcccagtatctgtgaacacgatcttatttgaaatcagatctttatggatggaatccagtgaaggatcttgcgatgagatcatcctggacttagggtgggccctaaatccaatggcttgagccttatgagggaaaggaaagggagctttgagacattcgtcacacgaaggagaaggctatgtgaagacaggccagatcagagcgatgtatccccaagccaaggtatgccagtgatggctgggagccgccagaagccagggtgagaggcctgaatggctttgtctctgagcctccagaaggaacaagccccccagcccccaacaccttaatctcagcccagtgatactgatttgggacctctggtgcccagaactgtgatgaaaataaatttttgttgctgtgagccacccactgtgtggtgatttgtagggcagcctgggaaatgaatatgatgtggattgtactacttattttttatttttgagatggagtctcactttgtcacccaggctggagtgcagtggcgagatcttggctcactgcaacctctgcctcctggggtcaagcgattttcctgcctcagcctcccaagtagctgagactacaagtgcctgccaccatgtgtggctaatttttgtatttgttagtaggcacagggttttactgtgttggccaggctggtcttgaactcctggcctcaagtgatcctcccgccttggcctcccaaagtgctgggatcacaggcatgagccaccgtgcccatgatgtggattttaaatctcatccagaggcatatgtgatgcttggggatgctacctgtgaacggggccgcagagcaggcggcaccaggagctgacagcacgcgtgtgggtgcagcacccgccagtgtgctgcgttccagaaataaacgtcaagtggcagctccccacggctgcgttcacccttgcagggggagctgcgctggtcctgtctaaaccccggctccgggaagccacctgtgctggcctttctgtttgcaccacctgattatgatttggatctggcctggggtctggttccctccagcgcttcctctgagggagtttggtgggatctggccccgcagctacgggtcctcacaccacatccccctgaagctggatgtttgaaaagtcatgtctggggactaattgttgctaagaagattgttgcttagaacacttaacctaaaattaaaatgtgcctttccactaaaaaaagatccctcctagatccatccgttgcccttcaagccactgtcaaggaggtgaagaccaaaatacagatttcgttttctttttgtgaagcatttaccaaatgtgaaataaatagaaatttcaggacttaaagaacatcaaggaagaaaaacactttatttttctgagttagaaccacacaccccactggggaatgaagttcctggttagaaacccagccccaccgaaatgaaacaaggggttgtttaggatacttacgttctctccagttctcgcttgttcgtttgttggttcatccattcattcatgcccatgcttgatgctgctgtatgcactgggcaggcatatgaaagagtggagcacagctcttgctaagggaaggggacatttccatgacaaccacaagccagcccccaagcgatgaggctactgtgggaagcttgatcatggaggtaggtggtacttggacaacctcccagctggtcccctgctcccaccctgctgcttctatctcctctgtgcccagcagcagccagaaggaccctgtcaaaacatcaccctctgccctggggatgtcgctcctccactctgagccctctcaccactccccactgctctcagagaaagagtctaatgatcccagtggccccacacggccctaacaattcagcccctgttcctattcagcctcatctcctgttcctctctccctcccaactatgttggcctccctgctgccccttgaacctgctaggcgtgctccagccatggcacctttcgtgtctgctgttgcccttgcctggaatacccttccccacttccttcaggcctatattttaatcccaccttcacaggaaggcctccccagctactcatctaagatgtcaacacccccagccctttctcacgtttctttccaatggcatttccctccgggacacgtgttatctaaaatgccatcgacttcatcatcctgtccatcttgtggctcccgtctgccacaggaggggtgcgtttgctgtggtgtcctcagtacctggggtgggattcagtgtgtggcaggagctaagtccacaatgatggcatgagtgggctgcccaagttcttggaggatgaataagagttttccaggtggagaagagctgcaagtacggcctatgccggggcccgagacagcagagagagtgggtgtttgggggcaggaaggatgggccctggatgggagccccaggctgcagaggcaggtcccaggtgggcgatgggctctgggtgttcgctaaggagtcctgtcctcagccaggggcagcagggagctctgcgggctgtttaagaacagagacaacatgactggcatatgggaagggtgtgtgtgcacactcacatgcttgggcggggtaacgtggatggggtttccaatgggaggtgcttttgaggactcgtgagactcatcttggataactttgattaaccgctgagcacaatttcttacctctagtgcaaatttatcttcaaggactccatcctcattacgataagatagtattaaaaggctgcggcaagtttctccaggctaggagaggtagcatcacaacaataaagaggcgccatctttgctttgctgtcttcaaaaatttcaaagcgtatatttcatatcatctaaaaactctcttggatgcactctaagttgcatcattactttattcacccctgaagaatggcgttgattataagccacactctgattttagagatgttaagttgtggaaaataaatggaggtcttagaatcaatgaaatgtggtaataatggaatgtacagatatgtgctatagcatgccagtttctttttgtaaatgcatccagtcaaatttatgttctgggggcttaagtgaaacaggctaggacctgctgtaaatcactaggcacgtgcccatgcaggcttcctcagaggtgagaccttccggttcattctggagagctggcctgggaagcatcttgcaggggagtggggcaccccaccagcgtgagatggggcttgggaatttccaggggatggacaatttgcgaaggaacaataccatccgcggcattgcagccatcaataatcgcaatcagatctcgcgcttcagggcgtaagctgaactctggtggaggtggaaaggaatgtttcttcaaatagaaccctgcaaaaatttccagagcattcctgctccaactttccccaccagcacaggctctccaagaccctctttgctctgtaatcatttcttctcacccctgagggctggtgtgtcccacacagtgggccctggaccaatgtggtggagttcagggatttgccacatggaacagagctacagagcaggaggctgcagggttgtttctgagtagggggctgctacctctccatgtgcctcagtgggctttagaacatgagcttgcagaggtggggaaggacttctagttttcaacaacatctggctagcagcttccaatgaggcccctcagcatcccttatgaatatttacaaagacacaaaacagacacaaatgcatatcaaggaaaatgaagagtaactggcagtcttatcccaatcagggagagaggatctgtcaatggaaggctgaggaaggtggatggagagaagaaaatctagccctctttccctggtgtgcccagcaggaagcacctcaatccttgtctcggtcctccctctgtcttggggaccatggcataacccagctgaaagccacttgcatccatcattgctggagggctgcttctggaacacgggtgtctgccaggagtgggctgagactgtctccatggccagaaaggaggctgaggcagagggagagagagagactcaggtgtgcccagtaatcagccctcagcatgtgggggtggacgtccaggggtaagtggacatggagggccccatccttccacctttgcacccctactgagagactgaagcttctggaaaggaatggggctggctagggatttctgggaggcatgcagcttgcaggagacagcatcctgaagagtgaatgcagactgtgacttcaatgtggatttggaactggacatccaggggtaaaagctggctctgtcattagaaagctctgtggcgttgaacctcagtgtgcccagctgggaatggagcttggaggccatgcctccctcccccaggctgcttggatgcatttagtgccccagggattggttcagaagtgagcttgttaagtgggtcatggtgtccaggggaccatgctggggctctgacatggagacaatgtggcctccgcacatccctcacaggcggaacagagccctccctctgcctcgtgcactgcattttaacatccctgactctaggtttgcaaacacatgtggatctctctctcctgccctcagcctggattttatgaactcagcaatgttccctcctgtgacctttcaccctttctcctctcttcctggcatccagtctgtccagctagcccaaaaacagatccggctggacagacgttagactgggaacccctttccccataggcagatgctgtgaagtactgaaaatactgaagtggggaacttcgggtgcactggtttggaattgttggaagagggctccgcctcatttatccatcatgggtgagggaggtgtattagtcctttcctgtgctgctataaggaaatgcctgaggctgggtaatttgtaaagaaaagaggtttaattggctcacagttttgcaggctgtacaggaagcatgatgccgggcatctgcttggcttctggggaggcctcaggaaacgtacaatcatggtggaaggcaaacagggagccagtacctcacctggctggagtgggaggaagaggaggagtggagagtggtgctacacacttttaaacaaccagatcgtatgagagctcactatcacaagaatggcagcaacggggagatctgtccccatgatccaatcagctcccaccaggccccacctccaacattggggattacaattcagcatgagatttgggtggggacacagatccaaaccatgtcgagaaggtttgtttgttcatttgttcattctaaaattgtgtgtgtggagcctactctgtgtgggcctggtgtatcccacatcagtgtcttctgggggaggggtgtcaggctgacttgaagggagatggggagtcttgggttcaacaccctgctcccccatcacgtggtgcttcctggctctgacagctgcagcgcccatgtctccaatgtggcatgcccacaacacgcgctctgtggggttgtccgtgtgtttaacaagatgatgggtgtatcagcacctgggctgtcaccacctaagcctgacaccttttaatgcaaacacattgccttttctgttaatgatttttgatgagaatctctccaaaatgcatcatataattttctgggagtaaacgggcatcttcgtggttgccaagcgtgtcctagttgggcataagtgtctctagtttgtgggttgttggaggcattagaaagatgatatagctgcatctggcaggcacccactcagaaaacaaatagaattgttatgtttctccatgactcgaagtcatggtcaagagcatgaggacagggctgtagggttgagggctctgcagacaggtctgatcacagagtactttccaatgaaatgtatccaaataaacctgagcaatcaatttattgatccttgatagagtacctatcatgtgtctggctcagggctggacactggatggtgcctggaatcacccgtgtctgctctgcgatgttgccagaggagactggactgggtaaaggggcgactttgtagaggctgaatgtccccaggctgagaggccttgggtcaacgtgggtgcagtttgcagatctcctttcctttagaatttggaggccagactttcagctgtcacttcctgttgctgcttgtgtacctggttctagaatttcttcccctggtgattttatgcttctgttgtcctgtggtccagaaacctggattgctattcttactagtgttgcaagcagactaagtaaacagtctgagtaaggaatggaggcagttctccagcaaggtgcatgagctttgatgtgtagtgtcgtgatgctactgcacttctatggagggtctgactctctcctgtctcatttattcaaccattcattcatcaaatttatatcgagtacacactctgtgtcaaaaacccgggactcctagtgtccgaaaaaagaatgcaaatgaagtgcatccaggcaagtgcctggaccgaggcttggagagtgtgagacggtagagtgaaaacttcgggctcagtggggagttgctctgctcataatgcgtaacgggggcagtttctgccagttactggaaggtaacacaggtccctctgtgtgagctgagcagccactgttgcaagtttccttccagccaccagccccgctcatagcctccgtggctccatagaagccctgggaaggggcttgggggctgttgcactttggtccctgttgcaggtcagtgtgtggatcatcctcagggtgctgctgagatgtcatggggctttggaagagattgctcttcctgggaaggcagcctgcccatgccctgtgctgagggagtgcctggagtgcgggaggcctgggacccccatctcaagctgttccctccggcagacaagatacgtccccagctccaccttggggcaggcgtccttccactcgctggaacgggcttcatgttcagtctgttctgttcagcccccaaacccaagccatctcttcctggccagctcccttgtcctgatgtagaggaggcccctgtatctgagagggctgtgaggcccccttattgctgccgcttcctgcctcccccgctccaggccccgggaaacgcactggaaactcaggtgggcctaattcttggcctacagcactttgcacccagggagcttcctaaaaccacttccctgcttgggagcttccagcccttccggacttccagatgaaatctaagctcctgaatgcgatttagaaggcaggccagagctgacctcatctctgtctacttcccctccggaactttctctccagccacacctagtggagcagaagagcttccattcatcacgcggcagaccctgtgctcagagttgatgtgtgtgggtgcatccaaccccgtggggaaactgaggcacagagctccgctcagtggtagggccaggattggaagggaagccatgtggctctgaatctcatgaccagtgggccgttctgtccacactagagtgaccctgtagctgtttcctgcttctgggcttttaaacaccttggctatgttaactgtccagccccaggacaggagaaagctccttcaggaggctctccctgcccccacgtcctgtgagggtctctcctgggctcctttggctgtgtatggagggtgggtgggtggggattcttttttgcttccaaaagctcagtgtaaactttcctgctgtgaggaaggaggcaggggcttgtggagtgggagaggaggtgaaggcagaggaaagaagggggctcatttctttcggaaggagctttaagccaaaggtttctgtgaccctggctgcaaatggtcatccctatccccagctcgctgagcgggggtctctgcctgtgtgtgccccacacagcagcagggatgagtgtgtttgtgtgtgtgtgcagcttctcctcaatacagacgggctttccgtgacgaagatgagaaacgtggcccagtaaggtaaccaggagtcctgcggagacagtagaacttctagggtcagcaaggtcctttgggcttgggaatttctggggtaagctaaagtttcatgacatgccggcagaaactgttgatttacttgaaagtcagggggagagatgattggattagacgggggagatgaattgctgcctgtgctcggaacaccactccctccggactctgagcttctgggagcaaaataatttgggggtggccgtctgccctggccagtcagcctctggagggcccatcctgggatgctcagagccagcctgcctaccgtgcccgtcctcctgcagagcgctgggtgcagacattcatccgcctgaagctcctcatctgtgcactggggctttggacctgatggtggctaggagtgcctagcaggagattctgcagctctgcagagttcagggacagctccgggggaggctgtacccactggccctggacattgcggtgtacaggggagtgtctgagcacgtcttggcttcgcttgtggataccttgtcattggtagtgggcctgatcattatgcctgtgacagatgaagaaattgaggcacagagaggctcagcaattggctgaagattgcagagcagcagcagagccaggtccctatcccagggctccccggtgccctcttattcatctacagccccacgctgcaccctgggcccagcaggagctgtgttcatcaatagcgtgtaagtccccacctggtgggaggagctgcatgggcatcacagcctctaacatgggcatccctctctcctctgagcagcctggagtctaagcgcattgccagcactgatgtctgcctggttgggacgagttcactgagcgtgacggggtcttcgttcttcttcatcatcaactcctcaggcatcacagggctttgcctctgttttgtgagagggggtggggggcagactattgcgatgtcccaagagttgttcatgaggaaggcaatttccacacagcacaaacagcccagggtctgcttagccctccctttcccacaggtccagctctgtctgttgggtgatgttgacacagggcaaggtgccggctctgcagtggtagcgtgcccagtgtacatctgtttcatagacccagggacattcctcctggccttccttcagcaggtgtctctgagcgcccctaatgtgtgggcccagcacatgcgcttatggggccagctgtccttggatgggacggggacatccagcacagagagcagccttgctttgtgttctgtgtttgctgccacccaatgctccctgttttcaagcaaaatggatcagttgggatgcaggtgcagataaaggagacccctttaactggcttacccagaagggatctgacacaggaatgacatgctctcttagagcttagaaaggcttgagaagcaagctgaagcctggatctcctacattgggcatccagaaaaccccacagggctggccacagtcaggaggccagccattgcaagtcctcgtccagggaacgacccttgaagccaccatctacccctgcaaacgaataccccacccaccacctaatttaagttttgctccagtgcttcctatgggagaactgaaatcacagctgtgatcctagctgtctgtgagggagttctggaaatacagtttacacatttttctgtattgatacacccctcctcccttttttggtggtggttcaaaaagaggaattgaatggcttacaaagatgtaaaaacagtgtaaaaataaaatcagcaagaaaaaaaggaaaaacatcagatggagctagggacaggcttagcagataaaatacttgcagcgttgctaaaggtggggcaaaatgtgtctgtgagcttccccacagccaaagtaataaggaaaagatgaagcagtcaaagtaaaccagttgctcaggagagccttcctgaaccggatggtgatgtcagtggccactgggctggtctcatgctgttacaataaatgcggtggtcagttccatttcactgttacttgtaacggctcaaaatgcagtttgatggcttcatccccaagcctagttcactaagatgtctctcacagaaaccaagacagccagttcaagggcgatcttccctgcattatcaaggcatggcgcaggccttaggtttgcctctgtaaagcgggaagtacgagattgagtgtccagccgcggaattacagggaggtacgtgggaaggagggtggagtccattcataggtctgctgtgtttgcagaaacagacgaagggaacattttgtacctgttgtgggtaacatttgtatttacagttaacaggacaaactataaatttgggcaaaatatctatttctggacgcacctcccctcccccgccccccaattaatccactgtgttacatttttgcaactctcaggcaaaggtgtcaccatcgctagggagacccttccagttacatcccaactcccagctgaccttaaacttcagacctcaaagctgtccttccaaaaactgactggactcagatcaaatggtgtcggctgcagcttctgataatttgggatcattcacggtgctgtgaagtgatcagtctggaattcaggcctctctgtctcctttttgggtggcatgactcatatttcctaaggacaaaagagtcaagactcaggcaaagcagcctacctggtcatatcttctactgcaacttcatcccgggtacccacagagaaacagggactcaacacccaggaaatcacacgtggatttctgtgctccggtaggaagaggggcactgggtctctcccagggctcatatcagccatttaaaaaaatgactgcactctcgagaggcgaggatgggaggactggaccaaaattgactgttggaaaatgccagggttttgaaactgttgttaacatttccagaatttgtgtgaaagagtgtgttccttcttatttaaaccatggcagggtgggcatttggggagcccatctcttttacttcttgcagaaggataaccccatcatcgttcgctcatgagaggaagtactgcctgtcattctgggagggccagtgtttagacatgatgtttggatggcgtggtaagaatatacgtagctctgtcaggaactgccaaactgtcttccaaagtggctgtactgatttcaattcccaccatcaatgaatgacagttctttttgctccgcatcctcgccagcattttgtgtttagggtcctgcctcagtttccccttttgtaaaatacagagatgactagtactgcatacgatgattgtagcaagggatggatgcgctacaatgaatgaatgaatgcatgaatgatataacccaagtacagtgctcagtcagcacctggtacccggtgagggcttaggaagcgtcattatccagcactcggtaggcatgaggccaagctgcacaaatgagttaatatgtgaataaatactcaaagccctttctcccactgcccaaagagcccagtgtgaggacttaattagttgagtacagccctgccacaccacaaatgcgagtcgcgtgtctgaacgtgccctgcccacggtatctctacatttttgaagcacggcctcataaaaggagagctatgataaaacccagcagaaaacacccggaggccttcagtgttattcatgctgcacaaaagttttttcttgtcaggctcactgatggaagcagagcatggggtcactcttgccacagccgtgttcttgagaagaggctgctgtttcagcgagaaatcattctctctcggggggaccattttgcccatctccgcttgtcggtgatggtggctgacatgttggcaaaactgtctcatttctccgtagccccttcattcggggtgtcccctcctccaggcatctgactcacaaggggctgtgtcctgcagctgcgctctggagaccttgccctttctcctgcctgctgcgtcccctccgcctccagcacgtgggcctttctgtcctgttgctgggctgtgcgtgcgtccagtcatcctggtcttattctggagccaaacaagagcgttccatcctctgtgtgtctctggtcaccaccagactcactcatgtcattgccatctgtttcttgcaaacccggtgaaactgcgagcctccattgggccgtttgtgtgggcagtgagtggccaaaccctagccttgatggcagcctgggggccgcaggctcccccatgagaataattgtgttgcggtccctctttcctctcacctcctgccttcccttctgggatgatcctgtgtgctaatcacagccggggcctctgaagtttcagtgccgtctgtgggtgggggctgggttccttcttattcctttgcatgccagagatgagtgccgagggaccgcattttccaggactcgtgacatggtggccatcttgcactcccagctgcctgggcacacgccagtgtgtgatggaaactccacgcacccactcctgaaattgcttccctcgccactctgcctcgtggagctcctaaggggaaggggaacctcactttggcccccaccgcactccagactcattctaaccacagggcctggtttcactactgtggtttttcccacggaactcagccccgggccaccttcatggcttggttcctgggagggaggctgtcattacagatgggaagatcctatcagtgccggctgctgctgttaccgtctctctggcctatggggcctttgctccctaacgatgtttaaatatcaacatgcagttattcaaggacttctttgaaggtttaccagagtgatagacatgtttttaagacaggatcttttcctccacccctttaaaaagtagatcacattatgatgtttggggaaaatctcatgatttcaatgcataagcctgtataataccttattcattccgaatgcaaagaactcaggatcacagggtataaatgaactcagtttgtattgttggagtgttttgtgccatatgctgttctgacttaatgaggatgtagctgtatattataaggatcaccaaagcagcctagatctgagaatctattcttagctcccccactaatcatggggtgagcctgggtgggagccggtgggaaaggatagcacagctggtctttgggtggtgtcagtcacgccagtggctgtaggaccctaggttggaggtgatttggtccataacacacagatgaggaaggaaactggggctgagagtggtgtgatagtctcaccgcgaggctcagccagcggcaggtggtagagttgggattcacactctagggggtcttgccctgtgggacccagggctgtcatcagcaaacgccacccactaagatgcttgtctgtgccaggatggctgggaagtggggggttcagcatctggggagggaaatctaggtaagaatttactcattcactgattcattcacactcattaattcattcattcactcattcattcattcattcatccattaattcactcattcacccattcactcatttattcatccattcattcactcattcattcacccattcattcattcactcatttcttcactcattcactccctccctcctgaaacatctgtggagtatccaccatgttccaggcacctttctaggacaccatggtgagcaagaccctgcctctttgggcttcgtgtccagtgggggagacagatactgagcatgcatgtgtgatatgacataaagcagctgagagttggaggaagttcgaggacagtttccctgcgggagagggtcgaggagagaatgacttgaggaagaggagacgtgaatgtaggcagttctttcctgggctgctttgcaggggagcagaaggtgggtgttggctggaagcaagaccggggcaaagtgcctggcactcagtagggcttcggtaggtgtttgtggattgaatggagagtgcttgaaactgctgcagagcctcagggcgggggtctggagtgattccaggtttcccagctcctggattcagagtctcagccattcactccaggaacagtgttcccctactctggggtcatttgatttcggccactgcttagagttttgcaaagtggtctctgacctgtgcctgcccttgtggggtgacattgggttggcggcagtttctgcagcacagcagctcagaaaagcactgtgcggtgggcagttcaaggccagggtttccaccaaacataggtggggcccaagcaggagttgggaggagttgggtctggctacagcatccaggtgagggggtcctggggagagaggagatggaggagggggcaggaccagaacctggggagccttgggcagttttggcttctcctgcctgtgctgggagccacttgaggacttgggccataggagcgagggatcctttgtgttttgatcttgccccttggcctctaggaatctgagtttgtaggatccttcactggcagccctgatgggatcaccagggatggggatgtacaacgttactacagcgtctgatctggggacacctggagtaaaccattttgagccatcacaaagtcagaggatcagcttgcaggattgcgcccagggaacctgtgaacacccacagagaaggcaggaccgcgcccccttcactcaagcacgaagctccttccctggccattttcaactgggacagggcaggagggcatcctactgaggaaggatgtacaatttccccatccagttgtttctttctccagagtctgggaggtgtgaagggaaagagccgaggctggggtcagacggtctgtgttcgggtcctggcttccctgcacacccactgcttggccttgagccactttatcaacctccctgagcctgtttccttgcctgtgagatgaagcaagctgtgcacagccttcagtacagtgcctgcacatagtaggtgctcaagaaatggcagccattcactgtgggaacccaggactttctcgctgtgcagacctcaggagagctcgaggttatgacctggcagctccatgaccctcagtccatccctcagcaggtgctccaggaggtgaggacagcatttgacacagaggcctgaaggggtcatgtctccccatccactcatgttctgaagtctagagggtgccatgccttggagctcatacaggctgtttatggcagagatggttctagaactcaggtcagctggctcctgcccaccataacaaattgctacaaccgggtggcttaaaacagtagaaatattctctcacagtccagggggccagaagtctaaaattcaggggtccacatggctgtgctccctctgaaggctctgggggaagatccttccggcctcttctggtttctggtggccccaggtatctcttggcttgtggctgtgtcgtttcactctctgcctttgtctccatatgggcttctttcttgtgtgtctcttatcaggacacctgtcattggatttaagacctacccgctcacctgggaccatcccatatatatatatatatttttttttttttgagatggagtttcactcttgttgcccagactcgagtgcagtggcatgatcttggttcaccgcaacctccacctcctgggttcaaacgattctcgtgcctcagcctcccgaggagctggaattacaggtgcctgccaccacgcctggctaatttttgtatttttagtagagatgaggtttcaccatgttggtcaggctggtctcgaactcctgacctctggtgatccacccacctcggcctcccaaattgttgggattacaggtgtgagccaccacgcccggccccatctcctcatgttgacattacttcattacagcttcaaagatgctgcttctagataaggccacatggcagagtggagacattaggatgtggaccagtcatgtaggaggccaccatgcactcccccacactgttcactatctcatgccccactcaccactgcacggagcgcctggctgcagtgggcggttgattttaattttccggtgttcctccctggaagacatggcctctgccagccaaggcgcgagcccctccttcccatgctttctgccatttggcatccagctctgccctccagacagctggcagaggggatggggaggcgcctatgctcccaggaggattttcctggggcctcgttcttccttctcgctggaggaccagaccgccaacagaagcttccggagcatgctgggccaaggcagatccccgtttcttttagtctggcgtgggctgctaagtccgagggtgcgggagtgtgtgggccctgggctgttagagcagaactgagtgagttcagatgctcctgctgagggggccgttctctgatgttcggtgcagccctgatttaggagcctggcgtgaggccgacagcctggggctgcagtgtagcgtggaggcccagtgcggggaccagcaccaccattaatcagcacggcggccggcaccgtgctccgtgccctgccgagagccagctgccccgccgggggctccctgcctgcctcccatccatcttcccggtgcctctttgtggtgggtgtaactgtcagcatccttgctgtccccctcagtcccctgatgagctggtaaacagtctcctagagtctccagctgggtctccaggcctgtgccggtcctcactgcacgactcggaccctgagtctcctcgcgtgggaagtgggcacagcctcatggtgtctccgtagaaagaagatagaggatgtgggagcctggccagctggagccaccgctggagagagcaggcctgttgtgggagcagcggaagagcctggggtggctctggggctgggttggggagctacctactttggccagaacggagcagggtgtgggcgaagggagacgtcctggaaggcagccacgaggcctgacgttggagatgcaccatcctctcagccctgtttctcttcttctcctgaggtttccaagacaaagggtggcaggctggctgggcctggcactggagctggggtcggtcccaggaccagaagggacatggtcccattcggtcccaggccagccccccgtatcttacggatggaggacacaggcccagggagggaggtgctcatggttgcaagggtgagagagagctgggactcgactctgggcctcctgccttctggcctggcactttttccacaatgcctcagaggttgcacatgttcacgggcctcggttaaccagagcagatgataactgaggcagactgggaggcgtcttgggtcccagaccgtggaacctgggtgctgcttttcagggtacaggagctatggaaggtcccaagaggaaagtgtcctgacggagcttcagtagctgaaagtgggtccgagtgaggagacacaagtcagcagaggcagagagagggaccagggccactggtacgaacgcttcttgcatcaggtggctgcagcccggcctgggagttgcctcctcctccaggaagccttcctttctctcttctgggtttccagggctccctgtgctgccctgggtcacagccttctgtgttgacttcatctgtgcactccctgagggcaggatttggggttcccttggggggtctcctgccttgcccaatgaggggtgcaaagtgtccttaatgaccgaccaactggaaaatcccagatgagaaagatcaaggacccacttgggaagaagagaaggctctgggtgccacagaccacaaggcgagaccctgggaaaggtggggtgtccgagaggctctgaggcccccaggcagctgtaccctgtccctcctgggtcctcccgtctgggtgcgtcccaacgggttctcagtctggcagtcttttccagaaaggttcgagccaggaatggaaaccgttcctactgggagctgggcgtgggggcacatcgcccttgccacggcccccaggctggatgggtggggagacgggaaccttgtctcttttggcagcaggagcccctacttcatggccacttgcatttggcaggagggagcacgttcggacttggggaaggggctttgtgccgccctcgggagagaaagtctaattttacaagtttagagttcagccagtggactgtttgtgtcttttattttaaaaggagatgacaatactggcattgactgtctttaatttgacatttgactgagagaacagcccagctccttagtggctctggtgtattgatcccgtgctgtgggcgggcgtgggtctgcggcttcctgtctgagggaatgcagtgccacggacagacttgatttgtttaaaggtggtttttactttgaaggaaaggctgtttcttccgctatggtaaaaacagttttctggtttggagaaaaagcatgtaaatcctccacatgcaggccgattggagcccaccctctgagcctcttctgacagcttcacccagcccctgtgggatgggagagcccgttgctggcgttgctgtccccgccgtcgatggcaggaggcgtcctgaaagccagctcatgccatgcggcctcctccggtgatttcagatggggctccccggggtttcgatgcagtgtttaagcactcgagagctcggctgcttaatgaaggagttaatctgtgggacgtgcggtggctcagccagaactgccacccatgtcctcaggatgagcacctgaaggagcaggccagctggaccacgagaacttgaacctcacaccacactgcgatctgaaattcggggccttgctgagacgtgggggccccgtggtcctacctccacggtgaacttcttttgttttggaggctatagaggcccataggggagtgaggggctctgtatttgtcaactggggctgctgtaaggaaacaccacagaccaggaggcttcaataacagtatttctcacggtcctggaggctggatgtccaagatcagggagaggcagaactggcgtctggtgaggacatcttcctggcttgtagatgggatggcagcctcttctcccaggggcggggggcggggggcggggggagagggggtgggaggaggagaagagagaggagagaggagaggggagagaagagagagagagagattgcatccccacttcctcttcttccaaggccacagtcctattggattaggtccctactcctgtgacctctttaaccttaatcaccttcttacagtccctgtctccagatacagtcacattggcagcgagggcatcaatacaggaattcatgtggggtgggggggggagttggggagggcacagttcagtctgtcctcagcatgaaccctttttgtttgaggtggctgctgcccagcccaggtaccacctcctccaggaagccttcctgtctctcctctgggtttccatggtgtctgtgccacctcctccaggaagccttcctatctttcctttgagtttccacagtgtttgtgtcatgctgccctgggtcacagtcttctaggttgactctattgatcaatcatccctctcccttgggcttggcactagattttggcagagctagcaatggaaaacacctgttcagttcatccaggtgtaggtgacatatggatatctgtcatccagggagcccagatacagttgaggaagcattattccagtagttgggtgctttcaggttatgactgaagttccttccctgtggccctctgcagatggaggtctctctacctggaagaccctcctttgcctttgtctggctcacttcttctccctgggaatcaggctggggtttcctcctccaggaagccttcctggatttcacagcttggagcccactgtgccaactctgacatcacatattagtgtctggtcccttgcaggcaaggcccggctgtcatccccattgttttgcagagcctgccaccctgcctagcactgagtgggtgctcagtcaatatctgctgataggatacaggctcctagtgcctggaacagtgctggatgctgggggcacgtggtaaatgtttgatgaattcattgaagtcagcactgtggattggcagcagctgccacagagaccgagctgcagttaataaagccctcccaggcccagggcaaaggtaaaatatcacaattcatggaaagcttttcattaaagctctgcggggagttttctccagtattagcatttttcagactctcctatcagcagcgcttcgaggataaaagctgtgagctgcagaggcggacgtgggtgaacaaacacaggctatttgcacatcccaaatagagacggcgctcggcttgcggcccttcctcccgagacgctgcagggcctcccctttgctcatgctttcaaaggaccctaaaacattctgcatcgccattgtcacctgcagcaccctgatcgcagccaggggacaaggacaagagtccccttccgattgcctgaaaagccatcctctgagttggccttggcactcccaggctgcgagggaggactccacacgggagggctggggagacctttgctgcctctgagtggctctgtaccaggggccaaatatgggggagactgcaagtagctgagtgaccctgggctggcaggaagctgatggctggccccaggggaggtgggttcacaccacatggcccagcgcccttatgtatttgtcaggacaacccgtggcagctcttgtaacgaacacatctcagggtctaacacagcgcccgtctacctggctctcagtgggctggctgctctctgagtagtgacctgccatctggaccccttcagctgtgggcgccactatctgtaaccttaacttcagtgtgtgacaggaagaaaaacacagatgctcccacggggtgctcagggctttgactgtcccccagacccagggtcttctggtgtgaatcacagaggaacctagttgatttttttcccttcctggatttttctcccttccccatgctgccaacagaatcctcccttcatttctccaggtctttatacctattgcccaggtggggaaattgaggcctagaaaggaaaagggtttgcagtgaaccatactctgcaaaggagcatggagacttgaacccaggtctttgagctcctggggagtgttcctcctgcccctcatccatgtatgcacacatgtgcattatgtatgtgcgtgtgtgcgtgcagatgtgtgtatgtgttttggggaatgtagggcagggctagctctcagttgatttgttgactgtaatgactgcagaggctgcattctttcattcattcattcattcattcagtgaatgtaggttaagggcctgctatgctccaggcagggctgaggagacagtgaggaatggagcagacatagtccctggctggctggctggggaagctgtagttaaagaatgaattacacggttctttatttaattgccccaacctgatcactcctagaagggagacagtcctgggaccatgttttacccaggggttggacaaggtctctctgaggtggggacatcttagggagatggctaagtggagcacagggcatggagcaggggggacagcatgtgcaaaggtcctgaggtgggagggaccctgggtgtctaaggcagaggcacctgtgacatgaatagaggtgagagaaggggctcggatgaggcggcggtgggggcagagctgaggccacatagcaggtgagagggactttaactgaacagctgtggggggccaggagagggtttaaaagcaggacaggggtgtggtcgtttgcttttcacagcagcttcatgactgcaggtgcagacgggccacggagcctggaggagtccacgcctggcccatgggaggcctctgccacccacatcagtgctggtggtcgggccagcgaggggctggtggtgccgtgagcaagaaggctttcatcatgagggctcccagggttctggctcggtggtggatggtggtgcccttcctgggagagagagatcacatggcgttttgggccccgggctgtgggatctaggccagcgtttcttctacagcagcagaaatgcctcagcgtgagcgtcagtgctcggtcaactgcacggctgggtcagggctgcctgccaggagagcctggtgtgtgaaagagtctccgagacaggagaaaccaaggaaggggactgagatgccaccagcaagtcctgtgggcccatccctgtcttatgtctcatctatccctccctgctcccttgtgattctcaccagagaattcatctttatggacacggaagccgatatgcaaagaggaaggtctccagggttttccaaggtcacctagcccataaatgacacagcttgttcccattcaagtgggacaagcccctcaaccgtaaacatccccacagtaaaactgggaatgcggccacacaggtctcacggggccaaggcagggatggtaggagatggtgtagggagatggtgctcctaactgtgactgttgtctgggggagggtcccttggggctggccctggaggggaccgtcatgggaaaccagaccagcctcacagaaactgagctcggcctggatctcagctctctcccgctgatctcctggggagaaaagctgggttgccgcttcacagtccgttcaccaaggaggctccccccaccattgacagtctgttcaccaaggaggctccccaccattcgcagtccgttcaccaaggaggctcccccgcattcacggtccgttcaccaaggaggctccccaccattcgcagtctgttcaccaaggaggctccccaccattcgcagtctgttcaccaaggaggctccccaccccacagctcccatcactgcattgagtgctcgggagataagaggaacccagagatctgatccgggcactggatctcaggaagatgcactggtgtggatcgtggtggtggttgtgttcacagttagtgtgctctggggacctgggcttggcctgggcagggagaatcaatgtaactttagggtgcacaggagaaaaagattgtatttctttggggttctcctttatttgctcttttaacattggctgctgcttgttaaagggagagaagacctggatcactgactgggagcaaatctaaaggttcaagggggtttggtgacatctgtctgcctgtgtccagctgggatggctagagtcaggcagggcagggcttggggcctgggtcgggaatcccctgctgttttggagacgttgccatgatgcccttgatgaagatgctacgagcacagattgcacgccttgctgtgaacttgggcagtgtgctgaatttcttttccagaaggcatttactaattaaaaaggaaaaatagcccatgcttattagaaaatacagaaaagcagagagaagaagagtggtccatgcagatagtgtctgctgggttacctctgctgatttccttttctctttctctattgaggagtctgtgacattgaaaatggtgcttgaggctgggcgtggtggctcacacctgcaatcccagcactttgggaggcccgaggcgggcggatcatgaggtcaggagatcgagactatcctggctaacatggtgaaaccctgtctctactaaaaatacaaaaaattagccaggcatggtggcgggcacctgtagtcccagctactcgggaggctaaggcaggagaatggcgtgaacccaggaggtggagcttgcagtgagccgagatcgcgccactgcactctagcctgggcgaaagagcaagactccatctaaaaaaaaaaaaaaaagaaatggtgcttgagatgtcccagccaccacctttgtcccctgaccgacttctctcttggcttctgtcatacacaatctcacgacctcctgcggtccttgtagacatggctttgtatagcagcctacatctccatggagtggataccccagaatgtctccaatgatccctctgctgttggttatttttggctcccctgagtgtgaatgcaccgtttgcagagtttaagatcttttccctaggagagattcctggaagtggcatcatttgttgaaggtagtgaatggttttggggaactgggtaaagccaacctgttgctttctgtaggcagggatggcatagacaggtgggctgtgctgggggacacagtcaatgccttggattctctactggcgatccctatgcagaaggtgtctcagtgcgtggtgcccagcgatgtgcagctgcctgggggagcctagaggcttcctttggtcacagtagggcatgcctgcattggcttcttccaaattagcgtctctctttcattagtgcttttggtgataacttttcagccaggacttggctattccgaggcgctgtccagcagggcgcatttggatggtattgcttgctgggattttccctttccaccaagagcattttgatgtatccaaattattgccgtacccttttccttttatttttacccacgctcctgagactccccctggctctagtggcgtgtcctaccttccggaaggtcaggtatgactgaagccaaagttgcctcagaggctggggaaggagtggcttctggttagttacgtctcatcagctgagaggttctgagcgtcctatgtgcatacgcaccggtgatgcctggcaattaggaaagagcccatgatgaggcagtgccggggcgtaggggagaggagggtttctgtgggcagatttggggtggggcaatttctaatagagggtaaaactggggccaaggcctatttgggggacagatgtgagaacaggcatcctctggtgtaaccaggacggggctaggtggtgcaggggtggaaggactatgaggccagaggtagggcaggaggctgtgtctccccgcagccgaccttctgggaactgcggcctgcagaccttcagatcatcagagaggcctctgacagtgtgcagagcacctgccccagggagctcctcctccatgccccagggagctcctcctccatgccccaggggtgcagggggtgctctgggactctggagagaggactgtttttgtcctctgggcccagccagtacttgccgtgggcaaatcctcctagttcacctttcctccccctctccctcttcctctccctcctcctcctcctcctccccctcatcctctccctcccctcctcctctccctcctcctcctcctccccctcatcctctctcttctccccagctccctcctccccctccccctcccctccctcctcccctcctcctctccctcctctccctcctccccctccccctcctctccctcctccccctcctcctcctctcccttctccccagctcattcctctccctcctcctctccctcctcctcctcctccccctcatcctctcccttctccccagctcccccctccccctcccctcctcttcctcctcccctcctcctctccctcctctccctcctctccctcctcccccttctcctctccctcctcccccctcctctccctcctcccctcctcctctccctcctccccctcctccccctctcccttctccccagctccttcctctccctcctcctcttcctcctccccctcctcctctccctcctcctcccttttattttctcccccctctagccccagccccctcttcttcccccggctcctcctctctctctctcctccttcccctccagaggagacaccattatggccgcccacacaatgaggcgattgtgcacagcagcccctctgagcccagaaacatggcgcaggcctgattttcatgaataatcagactcctggccaggaccgcagcaggcagcaccctgagctctgccggccggccgggtgcgttgctactgggctttgtccagggatgaagagcccctggcttggtgccctgttcctcggcaatagggtggggagatggggccggcagtggagcctggccgttggctcgagccgcccagccctgggagcagccgagaggggccagagcccttgcccagggtccgtggatgggaagcgctggtgggggctggactccagcctcacgtccatgtcctctggccctgtgcctgggaaccctggagggcagccctactgtaggcacccatagggttactggtgtgaacgggacggcactctcagccttattgttgccaccatgtggggtggggacatgcccagcattggatatggcacccaccatttgaggtgtggcctcctgggatggagccttggtttcctcacctgtccaatgggcattcccacacctctcccacctgggattggccaggctgatggagcagcatgcccagcacacagtaggtgatcagtgtggagaacgccaggacggctgctttcccatggctggggctaatggagaagcctgttgcaggggcttccctgaggttgacatgtcagagccaggagtcgtggagcagagccctgtgggagctgcgtcatggctgcgtgtgtggctgggggtccgtgctgggggccacagggagaaatgcgatgcagagtgttggaacccagcacctgccagcctgcctggcctcttcctcttggctgcagtgacacctgctggtcgccccatgctgaccttgtttctgtggctccttggggtgctccctctggggtgcccccatcttcctggacacccatgaaaacacccggaacccctgcccctgccctcacagcctccgggagctggaagtctcttttccccggagcaagcactgtgtaccctgattttctctctggcctcagtggtgagctcgtgttagcgggcaggctcatgcctcagcgaggttttaggagccgaggttgggcttgctggcaggaagctctgcctcctctccgtagaccctgaggtgggactcctggggacaacccaaatcacgggcagggtggcagagacagagagggttggggccctctgcgggactccacctctcctctccccacccaccccaccaaggactcagggttcagccctggttgaggccactcgctcctgcgaggcaccgatggaggggtggctacaagcatggaccttgggcagctaacctcattgctccaagccccagttttcctctccatcatttgggaatcggagtagccccagccactgagaagtgcggggaggggtgaacaagttaatattcactaacacggggccagcaccgggcctgttctttgcaggtcagcagagaagacatcagactctttccggagaggtgaccccccaacacacatacacacactgcgtggcttccctctatcgctcggtagtccttggctctcggggacagaagaggcatgggtgcctcgactccccagccccctctggccaaggtccgcgtgcccggcctggtgtccgaggtgcccaggccagcttcgtgctccttccccctccccagacaccagcatcttccggcctctggggatttgaacttgcagccgaacacctgggacagccatgccccctgtcttctgtctcaagactcagttgacctctctcctcagagtgcctgggggggtcctccccacctcccctggatgcccatgggttccctctctgggcatctcctctgcattaggtggagggggctgggattcctcagtatgcccccttcccttcctggaggccagaggccctgtctgagtcaccccggcactcccagctcggggttccacaccgtgctcagagcctgagggaggaatcggtgaatgagcccccagagtcggtggggctggagggaagagccacgcccccttctgcctctgcctgtcctcagtctgcagccctgtcccctgcatgaataccacttttgtgctttttctgcaggcccccgcccctcccccacccccaccccagggatcttgctgggtgggggatcggaagagctctgggggttgggaagctgcctctgctccttctgtccagacagcctgggccctggccatgccctgccccctgctgagtctccctgggtgaacgtggggcagagagggctgtgctcagtgactgtaagctcccttcctgtccccgagttcaagggctgctgttcctagatcctcgtctgaagtttctataaaatgagaaccgtgctctatggttcccaacctgagacgaaagagctgccgtgtagaagggacttagacgtgtctcatgcaactccaggagcaaggctggctcacactcaggctggcctcaggcagcacttttgggccagtggtgctgcctggggtcatggcactgcctggagcccaggtgtctggggctttgtgctggccccaccgtccagagggcccagccctgtctgtcctctggctgtgactctctgcaagggccagagaatctgtggagccgagactgagccccctggggctggtatccgccttgcaggccacatctggatacccaggaccctgtagttctgtgccctgctggcctgagcttgtttctagggcctgagccacctcttccccaggtccgtcctcccagagtgggctgcacagccagtgtgtgcacttggagtcccaggggtgggacaaggaggcgacggggctggggacagaggggaacagagcgtggccttggaggctgtgtgcaccgcaggcatgcaagaccccctggggtccaggacatgaccatggtgagaagagaaaggggcagtttggggacatccgtttgtactctccagggctctgcacatatgagggcaaggcaccccagcaggggtgagtgaggaagggttggggtataggaaagggagtatgggaagttggaggtgggccttgtctttcctggggtcttagtttggtttctggagtaatttcagaggccaggatgccctgacatacaagcaacagtgcagacttttctggagagggtgccgggagcttcctttggcctctgatcggtcagcgacccaggcaagggtagaactactgaccagggtgccccagcagcttcagagcaggcttctttgtggacagcatgtttcttggagccactggcggctgtgaaggacccaggtttctgccgctcccacggtgacgggagagggctgcctgtctgatttccagcttctgcagcagccatgccgctggtgtcatggaggaggaggaagccagcactcccgccgtagtatagggagcggggctcatgtccatgctaaccaaagacctgagcaaacatttgtgagcctgaggtccccgggcctagctgtgcccaggccgggtgctgggcccctgttctgcaaacatccctgggatcctcatgctgcatccggtgccccactgcagagcctggcggaatcagcccgcaagcccgcctccattcaaacaagtgtttgtcctcttctgggacaaggccggtgggaagataattaaaagtgacccagcatcgcagagttgtgcaaattgcaggattagtggggcattagcgggaggcctcacaaaagggccgttctggccccgccaccccctcttgggtcccccagctcccccagctgggcacataaagccgggggttggtggtgagacaggctgggggaggaaagtaggaggaattagcgtgaggtgggatgaatagggatgctttgcagtcagggcggcctgtccggggctgggggtgggccccctggcagccggagccaggcgaggtgggggccgaggctgtgagcgggtgtggaatgcgtctgagtggatggcgggctgtgccctaatgagaaattggtgctgccaatcaggcatggcccactgagcagcagtccagggccctggatcccaatccgctctccaccgcttgtcttcccctcagatggctctgcccctcagcggtgctaagttcctttctgtatggatcgcatggcctcggatacatctctcggggaccatctggcctggaacatcaaagaacagctggagatatcttctttccccttccttttaaaaaacaaagcgaaagcacccacacctctaggaagcgagagcatgttagatcctggggcattttctacttggttggtttctgttgtcctttcttcttaaagctgtatgggaagggagcacgtctcatccctgaaaggctgtgctcaccctaattgtcctattatctgaaaacaagggagatggggaagccgtggtccaggcctgtgtcttcctccaacttcccatcccattttcctggggcccgctgcctgcggggcgtttctgcttcctgggacttcaagctctgcaacggacccctgagctctctgtgttcccatcttaccgtccagccaggcatgtaggcaggaaagctggcgttggcctccgcttgtccttctcccagagcccgctggacactgcaccctgctccaactgcggctgccttctgagctgaggcagccaaattctagcccctgctgagctgtgacaggcaggagtcagggcttggtcaaagctgctctttgtctttgggggttgataagaaaactaaagcctggcagaatcaggacgagagaggatggcgcgccctccgcctgctgaggaccgggaggtggaacaggcatcgtcccacccttcgtagctactgataagtgggagatgcaggagccgagctgggttcttgcactgagggtgcaacgaaggcacagtcactgccaggagagcttcctggaggaggtggcccaggagtgagaggtctggagggaggagtgagggtctaatctcggggatggggtgggaagtactctgggcagaaaagcgggcggagggtggggggtacttttctgggaacccagcagagtccagggcagagagaaaaagcgaaggacttccgtgaactcaccgtgcagtgatgcagagaggtgttctttgcctctctagcttctgcaccactctcaccaagccctgctgagcctctcctgtgaagagaggcacccctgcctctgctttcagtgatgaagcggtggcatgagtccccgccaccacggcactattgtaagcaacgtgcacgcgttgacacagtaggttctcacggcgacctttggagtaggtactgtcattatgcccgtttgacagatgaggacactggggcagagagtggagaaagaacttgccagtctgtgaattcccctggtccagcatccatgcccttcaaccaccgcaggcaatgctgccatagcctgaggctaccctcccgtgaccctggtcccgctggccttcctcatctccaggccttgcttgatttctgtctgcagccagccttgacctggcatggggacctgagccagtcctgtggaagagccctgtttgagagccatctgtgtctggccactcggcctctcagggtcctgttgcatgtcccggctgtctccttcctgcctccgtgcctgggcagctccctctgcagacacccttctcgtgccttcctgcctcttctgtgtggcccagctgtctgtgaggtgctcagtctaaggtcaagcctcagtcttccagagctggtttagcagcatctccgtgggccccatcttctccttgtttcctcggcccagccctggcgggactgtgtccttctgtccctgcttaggcctttctggctgcctctggatcccacagcacagccccgatcttggcagtcgcttttcctccactcatttccttccttcattctgccagggtttgcttagcaccacctatgtgccagtcactgtgctagacgttgaagacacagcagctatcgaaacagaaacactgccactctcatggagccacagcctggtgggggagctgccgaggaggtgctgaagcccacccaccctcagcacaggcccagggagggacgagggtggccagggcacctgtgtgctcaaatgaatgagtgaaggaatgatctcggatcaatatcacacaaagttctcagcagctgtctttatgcaccagagaactcagtccagcgctcaggcgctgggctgacccctgagtatgggcccacattggctgggagcacggcaggcagagcaccctcgacccttctccccacggggcagaggcctaggttggcgcctgctgccagctggaagccgggcggcccaaaccctctgtgttcctcagcaacccagactgagtgtcgtgaatctttgtggccccagcagaaaatgcatttcctgaaactaccaaaatgaggtgaagatgggcaattgctctcctttttccatgagctgcgctggcctcccaaatgatgtcgctctgcatgtttctggattacattctcctgagctggaaggacggggttaacactaaggttccgttctcctgcagggctctttcttggataaatccaatattcagagaaacacatcagtgccatggcgcctctccttcccttccagctcttgctgcactcctacatcctctataaaaatcactgtcccctacagtggcctctgtgtcccaccgggacgcacaggcagcatcccacctggttgggcagtgggtgggtaggccaaagtgtccgtacctgcatcccggcttgccggtcttagcacttgatgacacgacattttattttgctcactagttcttgtctctggtctcatccgtgatacctgagctcctggtctgatggtgagatcctcacaggcaggcaccatcttgtatctctaatatttgtgtggtgggcgtttgcagggatgccaggtgcagacaggagtcagacgcagtgcctgcccgcaagtagcttgcacgttgctggagaaatgacaggtaagtgactagtggctgtgcagtggttcccatctcactcagaagaaaagccaaggtcacgaccggatcctccatgctggtccatggctgtgggcacactcctgcctcggggcctttgtacttgccacttcgtctgcccagaacgccctccctgcagccagatgtctgcctggctctctgcccctccttcgggagctgcacggtccccactttccagtgaggtctccctgaccaccttatttaaaactgcaacccagggccctccctgtaggccctgtgccctgacttggacctgtttttctccatggcaatgaccacagttggacttaaccatgtaatttcccatttattttgtctctcatctgtcttctcagtaaagctaagctcattttgtccgtttgttcactgctgtgcccccagctttgagagcagtgtccggcatctagtagacagtccacatatgtgtgtgtgtgtgtgtgtgcgcgcgcgtgtgtgtgtgtttgtaggagtgttctcctatacctttttacgcacaagggtattgtatagcattttatggtatcaataaacaagaatatcatctaattagcacctcaaagttcccctgatcacacattcgtaattgaggtttgtgtgcccctagctgcgtgggggccgcagccaagcggcgatttcacctccaagcctccgtggagggtctctgcgcccctggggtgctgtgtgcacagtggaatgttaatgcggccagtgctctgggccactcctccatgcacacaaaacagagctcagacgaggtaataaaaagcaaacctaatttgatttttcaaaattagtgcgcccagaggacctttttaaaaagaagccggcatggggtcagccgagagacagccatagtgtgggaagtaaactcccgagggaaacccaatatctaaaccactgaggcgttcctggcttcattaagtaaaggatggcaactttttaattgtgtcaggaactcagctttcaaggagttattaatggatgctctctgctggtgacgatgacaatgaatgttttttatgcgtttccagtcctcccttttctaaaaagaaacccgtctcatccctttttgctgtttcataattcctctatgcccctttttagttcttgagatgcattaagtatgaactgacttcatttgacatgcaatcaaattctccaggtcaactctggttctttctttcagtgtttttatctacgcttgagtgacgtagggcttaaaggaagagtgaatttcggcgtttggtgatggtcttggcaccctgcaaaccattctgggagctgaggtatatggtgctgagtgtcagggtatctgttgagttggcgagctgcccaccagcctgctccccatttctggggtctcaaacagtgggtgctcagtcatcacttgctgaattgtgggtgaaggaaaacaccttctaaggccaagtcagagcgcaggacgcagacctcggcgcgtctctgtccggctgccacagagctcaccgtccaggcaggagagagcgatgttccctgtggacctgtcctgagagtgtggggagagaaaggatggcaggggcctgaggggccaaggggtcaccacggctgtgtgcctgtttaccaggccctgcacatgtgtgattttgtgggatcctcctaagaactgtgagaagcaggtgctattgtcagcctcaatttacagatggaaacccgatgtggagtttcttttccacaccttcacgtcattcatttatttaaccaatacttgttgacgcctatatgtgccaggcatgtgtggtccccacgctggagataacagcaaagagcaaaagaccaaaccctgagtcttcgctctttccttctggccttatgttcttgcctgggggtcggggagacagacacaaacccagagacgatgaggaataacaaacagctcgacagacatgggtctgtgaggctcaaaaccccctttttcattagcgacgggggcaggtgatggttggtgctccctctgtctgtccttctgcccttccctccctctttcctgcctccttccccccttttatgcatcatccacaagcatctatttagcatctcttttgcaggagaactgatggagaagaggcggatgcgggtgggtcggcggccctcctgcctcccgtccatccagtgtgtttgttgaacaaatgtgcattgagcctgggctccctgatatcctctgggcctgtgagagccaggtagcgttcatgagcctcatcagtgctcagtaaacctgtgtcccttcttagccctcgattcttcctctcagagctgcaccttgagctgagtggagggagcagaagccgtggaggcgaacaggcctgagctcctggtgggcggctcagctggacaagagcttggaggctggcagagacctggtctgtgcagagcttggtggggggcctcagccctgtagcaaagggctccagctgcagaatcaagccccattcattgcttcctgctccctcttctccttcctaagaagaaactcacagtgaagtcagagcatttccaatgtttggggctgggttgtcctgggggcaacgccactgaggcttcatgctggaggcatcccggttcctgctcgtgagggcttctggcggggtgacaccacccttgctgtcggctccagagtcgttccttactcaggccgacattctggctcttctttttttttttttttttgagacagagtctggctcttttgcccaggctggagtgcagtgagtgatctcagctcactgcaagctccgcctcccgggttcgtgccattctcctgcctcagcctcccgagtagctgggactgcaggcgcctgccaccgcgcccggctaattttttgtatttttagtagagatggggtttcaccgtgttagccaggatggtctcgatctgctgacctcgtgatctgcccgcctcggcctcccaaagtgctgggatcacaggcgtgagccaccacgcacggcccattctggctcttgtcccatttctactttagtttttttttttttttttcttggaacactatttctatggaatacaatcctgagaaggaggggtgcccggccagtgctaaaagtggagacatggcgtggccctcacccatcctcccacatggcgctcagctcccctctccgtcgtctgcttcttgcagtggcatagcaggtggtggactaggttgggggatgcatttatcagggagaacgctcatggctctaaggcccccccagcatctcaggggcttagtgtgagagaagctgtttttgctcatatgaatggtcacaactggggttcaactggtggcttccaaggtggtccaataccctgggctccgtccactcccaggtctagggagaccttctcgatgccgcttggtggaagtggaagggaggggtatgcagaatcatttggaggtgtccctgggctgggcccgggcacgcccatactctgctgcccagagcacagtcccctccccgatcatccccccagatgctgcctctggcaactcactacatcctccagttcactggacaaacacttatgggtgcaaacacggaggggtgaggctgggggctatgctgctgaaacacagtgaggcagaagatcctgtgtgccttgagcaggatggctgaggagtaggacacatgtggtgtccccctgcctgcagtcactcccttcctcgacacactcttgggcttgctgtgagctggggagaggctagtggcagggtcccggtgctctgttccaccctgtccccatcccacgctccctgaaaatgagtatccccagacagctgcatgtgggcttgggagcaggtgcagcggtgggcactgggggcacagacacctaagcccgggctcccctccagagcccacagtcggctggctggctcagggcactgtgctggggcagtgggctccggggtaggcttgttgatggtccgagggtggagggggagggcggcatctggaaggaagtccagagttctggcttctggtgggggtgggtgtgtagcaggatcaggtctgaaggagccagaacagaggaaggggatcagagaggatgagggtggcggtggccctgctgtgtctgagggtttgcggtgtggctgctgcattttgttctgaggatggctgttggagcagagggagttcagaacagaggggctgggttggggggtgtaaactgttgtctaagcgacactctaaggaatatggctctcaggccactgaagggcggttcccgtggggctaggcatgcctgggaatcgccttcagttcccaaagctggtcctggggaaggagggtgggaagtgctctgtgctctccagttgctgtccagaggctggcaggggatcattcctgtggacggatctccatgcagtgcaccgtgcagagtcgcctggaggctggagtgtggccccgtccctggaggggtgcaggcacaagtggcaagcaacacatgctgcttttggggtcagtgggacggcaggcaggcagcgttgtgggcgaccccctaaaatggggctggagggctggactgggtgacatttccatgcagagcacctagaattagttatttgacaaagaagggtctcccctgccgtgtgtcccggagctgattcggtgcctgggagagtctgcaagtccacagtgtgcagctccccaggtttctccagacatccagttctcaaggggtcctgctgtgattgggagaaaccgaggctggggagagactaaaagcttctgtgcctggattagaagcctgtgctggacaaccctgaaggcgacgccagcctcatcggccctcacattctcttcccctcccctctccccaggcgacgttcagagccagataaaggcactgctgtgcccgggagggatcgttcacgggtcctgggaggggattctggaagattccatgcatgactctcctctccttcacttctgagccacctggaagttcctttcgtaaatgattcttccagaaaagaagaaaagcagccccttggatgtgtacagagtcctgtcccttttcctaccattgctgtggtccatccaggccagggtccacaggggaggctgtccctcattttacagatggggaaacagaggctcagagaggaggagcaaatgcctgccctggccgcttgggggtggggaagggcagcagagccaggctggggcaggtcagggctccgccgccatgcctgtcgagcttggcagcaattccttccttttggattgaggtcatcatttctggcatttgccatcagagggaagcggctgagggtgggtgctgacaactgttctgtaagcactgagggagaacagggcttcaatggggtccacaggggcagactgagaagctgtgagtggtgtgtttgttcatgagtgtgtgtgcccatgagtttgtgcatgagtgtgtgtgtgcatggtgtgtgtatgagtgtgcatgcacaggcctggtgtgtgcatgagtgtgtgtgcttggtgtgtgtatgagtgagtgtatgtgcatgggtttgtgtatatgtctgtgcatgagtgtgtgtgcatgagtgtgcatgcatggggtggtatgtgtacacagtgtgtgtctgagtgtgtgtgcgcaggcctgtgtgtgtgcacagagtgggaggtaggctcctgcccactgtctttttctagaggccatctttggctccctatggaccctctgtttgtgctgctggcatagtcaggatgcctggaaccctgttccaagtcagaggtgttgggagcctccagctgctttcatccctctccctctcaggggcactttcttgactccaccccaggccgagtccctgcgtgaaactcctttagggatcagtgttttccactccaggatggaggtcagtgcccggtggggcctcaaggcagtaggagcacccccaccaccgcctccaaccccctgccccttctgctgctccagcctggctggctaccttgggctttgttgagcagcttctcctctggtcacctttccagggggcagctggggacttttctggcctgtgtgtttggggtgggggtagatgggctccgtatttggggtggacacctgctcttcttccgatgccaggttgacccttacatgaaacccatccccttcctgggtttctagagcggtgtcagactggcctgttacactgagcactggtgggtttggtaacttgaatgaagggcgtgaccagttggagttgatattgcagacatgccagcaacctcagggcagttcctaaaggtgcccactggccacccacagctccttgcccaccccacacatctcttcttcactccccctcttcccaccagcaccctgtcctctctctccagcaccctgtcctctctctccagcaccctgtcgtctcgctccagcaccctgtcctctctctctagcaccctgtcttctctctccagcaccctgtctgtcctctttctgctcttccttgtgcctccccaggataaagccacagaccctgcccgtgcacagcagcagcagcagagacacacctctggtgtggcaccctccatgccaagacctcctgctctctggccctctcctactgagaagagttctggggcccatggttctggtattttggagcttttcagagccctgggcagaattctctctcctctgcaacttcccatcctgccctgcacactggaccgtggtgcctgggtctagcaccaggcgggctgggagccccttggttgtcagggttgtcagcacttggaaaggtctaaatcaccgggcgcacgctggcacttctgtggcacctcccgtgctgcaggtgttttctctcctgtgtgcaagtgtggaagctccagagaggttaagtgattggccctcggtcgcccagtgaatcggagatgccactggtgatggagctcaggcttcctgacttctggtctcgtttcctagcaacgcaggactcagggacccagagctctttttatgtacctgtaaaccacacgggagcctcagcccgtctggcagccaaatctatctttagcaagtgtgagaacgctgaggcctttcccttgaggcaggtcccgatcaaaagctagtttggacttgagcagaggggcctggttgacaccgggcgacacagacgatgggctctttgtcggaagcatttgaaatggaggagtgagaacctgccctccacacaggcatgtggctttggcttgctgctgaagatttttgaggtattttcagcttttttagtgcctctgaaatggagctgccaagcagtgggaatggaattcggtttgaggagtggttaccatacaccttctttcctcgaggctctgggctacctgctggggtcaagcgtgggcggggacgagagttggcccagctgtgcccttgtgtagctgtgtccaggctggggagagggcctgaggcccgcgtaacccaccgggagaggagatacccagtgagtgctgtggtcgccaggccttggtaggtggcagctggatgttctgcgagcttatgccctctccggagcagctctgcaagccaggggtgtcacccgcagtaggcagggctcagaatgggggttcaaggagcaggcgctgggaaatggggggattcaaactcaaaggctatgagttttccattctgaaaggcttcttagagaagggtaaggaatgggtggatttggggaatttggaactggggagaaagagctcccaggaacaggagcagcagggaagaccctgggggatggagagccagcagtcatgcttgtgcgtggagagctgacggctctggagtcctgccctggctgggcctccgctgggcagcataactgtgtcatcacatttaatctcctccacaactcatggaggtagacactatcatcacccccattttagaaatgaggaaactcagtcacagagaagttaagacagttgtccaaggttacacagccttgaatgcggggagtgacaccagcagggccagaggtgtgtgttcctcagagcagcctccctatccacattgaccggctttaaaaatggcatttattaaatacattttcataataatgaagtacaacttcggtatactttgtgaattggcttttacaaaagaccaactcacgaagtataccgaagtcatacttgattacaactaaaaatggtttgtgaaccaccatactagttgccccatgaggccccctcggacaggatcaagttccacttccagaaacgctaaaacgcagcccggagatctgctcagcctgatgcacacaccccagggcgggggcacaaggcagacgggagctggagctgagtctgcagagtcttccacggttctgaccttggatttgagtttgtccctgaagattctaggctgcgaagatagaattgtatcagcaaatcttggccaatctgcaaagagaaagatgtgaatgaaactgctcccatgagtcagtaatgcaggtcagcgtatttcagagcaaagcactcaccatcagctagaacaacataccagctttctgcagggtttcaaaagaacagttttattgaggtataatagagatataataaatcacgcagattcaaagtgcacgatgtgctgaattttgacgtgtgtttatttctcttgaaactttagccacaataggtaggggccacatacattacccctaaaagtctcctcttgccccttgattatctctgtcttccctccctccttggcctcctcccagacacccactgtctccttcccgccactatagatcagttggcctttcctagaatttcgtctctgcagtatcctcctccttgtctggcctcctctactcagcatcgctgttttcagattcagacatgttgtcacatcagtcaatcaattgttcgttcccttttattccatcctttctacagaccacaatttgcttatccatttgcttgttgatggctgtctgggatgtttctaggctttggctataacaaatgaagctgctgccaacactcctatacgagctttcgtggagacacctgtcttcatttctctcgggtaaatatctgggagtggaatggctgaatcatctccgggatatgtttaggtttttcaaagactgccagacttacccttttatatctccaccagcaatgaatgggagtctcaattcctctgtgtcctcgtgaagactttagagtcgtgtttttagttttagtcccccagtaggtgtggagtggatctcattacggttttggtttgcatttccgtgatgatgaatgatgtcgagcttctttatgggggcttatttcccatccatgtatattctttggtgaaatgtctattagaatcctttgtcattttaaaagagtttgcttttgtcatggttatagtgtttcgagaattttgtatacatgcaggatatgcgtcctttatcatgtatgtgatttgcaaatattttctcccagtttgtggcttgtctttttcattctttttttagtttatttttatttttattatttttattttgagacggagcctcactctgttgccaggctggagtggagtggcacaatctcagctcactgcaattggcgcctcctgggttcaagtgattctcctacctcagcctcccaagtagctgggattacaggcacgcaccaccacagccagctaatgttttgtatttttagtagagatggagtttcaccatgttggccaggatggtctctatatcttgaccctgtgatccgcccaccttggcctcccaaagtgctgggattataggcatgagccaccgcacccagccgtctttttcattctcttaacggtggctgctgaagagcgtaagtacttcatttggtgaagtataatttatcagtgtttttgtctgtgcattgtgcatttggtgttatagctaagaaagcttctcacactcaagcaccgatcaaccctcagctggaccctgagaagctcccactccggtctattgatcttgtcctggctctgcacccaagctgggatgcccctcatgggttttgctcggatcagggcacaatgacccctctgatgcctctgcccatttctcccttggccccctttctgttctgtttctcatcctggctcccccttctctagtacctacctgtctctggtgttagcaaggcctggagcttctttctgggtctctcagtttctagcctgggtcagcatcctctgccctccctcctatgtcaagcttgccctctgttctgtgctgtgagtgtggacatttgtggagccaggctatgcagaaagggctcctgtccattaccttggggttaccctgctgtgtgccaggtacgttgcagagtgcccggggacaagacggagcaaatgtcacgcccctgcttacagaggagctctggcttccactgcagttcaggaggaggtccccagccctctgagctggctgctctgcaggtcaggggccttttctttgcaacaagtgtgatattgggtgtcatgggacttctagaccagcagaagggcctggtggatctccagggctccctgcagagctgcagctggctgagcagcgactgtcctgatagctggctccaggggacctgctgatcttccaaggcctcgggaacagcatgtgtagctgggcagaggcctgcgaggactgggggtcctctaggacccctgagagtcagcctgtgtatatggattccctgctgtgctcatggcccagactgtgggagtacaacatggttaatttcacccaagcaaatgagctacctcaatgatggattccatttccgatgcattcattgtgcaccaacgtgtaggaaagcaatgggaatacaaatatgatggatttagctaaacgtgcgctgtgggcatgatctggtttggatgctcatgcatcattcattcagttgttagaaaatcatggagtgcctcctgagtgctgggctctggggacacacagcagggaaggcgcagtcctcctcctaaagccctcaccgtctgggggaagacaggcccagaagaggggaatgcaaatgtcaggctgctctctgggttgcgcaagagaagaacgagagggtaaagggaggaggagcggacatgctggggtggtcactggagcggaggtcggggagagggtgttccaggcacggggaggaaggaggggctgagcccggggacagacagaaagacctctttgggccatgccagggattgtggaagggccatagatgaaactggcctggacaatgtctcttttccagaaacttgcctggccttgtctgttttggatggccgcactgccggcttcactgcctctcgcctccccttgtctctggtctgacagtaatgctgtcccggaaggatgtgttcagagacgggctggatgatgtcacccccctgctcagaaccctccagcagctcccctgtgctgtgagatcaaatcccagcctctgtgacttggtccatcctgttttcaggggccctatctcttctgttcccttagcctgggaggccctgtcccattgagggcaggagtggtggcatcttcatctgctgcagaccccagagcccaccatgccacaggtgctcagagtacaggagtgacattcggggacatgcctgtgtggcagctgggattttgtccaggaaacttccagaaactttcccagaggctggagcccccagatccccaacccgtggtgcttccagcagcacatctgcttctcttttttgcctggagtcgggatcctccctgcctctgtgccgtgcggtgagggggtgccagctgccaagccaagtggggtcggaggagaggctgggcaggggccttgctctcaagctccactcctcagtggcacacggagaacgaggcagcgggatgcgacatgcagggctccgcattcacagggactctccccagagttcctaagaaaatcatggccttttttttattttttttatttttttttattttttgagacggagtcttgctcagttgcccaggctggagtgcagtggcgtgatcttgactccctgcaagcgtcgtctcctgggttcacgccattctcctacctcagcctcccgagtagctgggactacaggcgcccgccaccacgcccggctacatttttgtatttttagtggagatggggtttcaccgtgttagccaggatgttctccatctcctgaccttgtgatccacctgcctctgcctcccaaagtgttgggattacaggcgtgagccaccgcacccggccaatcatggactttcttaatacatctggattaattgattaattgttaagaaatgtgaagtggagagcaaggagggaccaggtcttgtcacttggctttgctgtgaccacgggtgtgaagacccagggcatagccgggctcccaggagcctgcccactgttctgtttttttttttttttttttttttttttttattgttgttgttgtttttgttgttgtttttgagatggagttgcccaggttggagtgcagtggtgcaatcttgactcactgcaacctctgcctccagggttcaagcgattctcctgcctcagcctcccaagtagctggaattacaggtgctcgccaccatgcccagttaattttttgtatttttagtagagacagggtttcattatattggccaggctggtctcgaactcctgaccttaggccatccaccgacctcggcctcccaaagtgctgggattacaggcatgagccactgcacctggccttgtccgctgttcttcttgtagctctcccctccactgtggagagccctgagcttcgagtgagcctccccaggctccaaaccagcctctgcagcccctggttgggtgatgatggccaggtgggcctccctctttgtgaaatatcaagtctgaccatgatcggctggtcacaaggttcctgagatcatggtgtcagtacttggtgtgtagtaggtgctcaatacatgctcattctcatttccattcttgccactcacattcttggctctggccaatggccaggcagcatggcctgaatcaatccaggcaatgaacactgactggctgtctgctctggggcaggccagggctggtgcggtggaggagagggacaccactggtcctggacctggagtagcccagggtctggggagacacagaccaggaacgtgaggactttgctgtggtgcgccacctctctcccaccctgtgatttgctcatgtcctctttcctcccaggaggatcctccctgcccctcctatggtgatttttgcaaggacagcccaaatgtcacctcttccatgaagccttcctttctccctgtgaggactctctcacctctgaaggtccttggctgcttctgccatctgctctggttacttatgtccatagcttctctccccagtgactagctgtgggctccatgtctctacctctttgtcttccccagcagtgtgggggagtgggggaggaagaggggagaagcctggtacacatcacccaacctaccatttctgcctccatctgtcaccatccattcatccacccatccatcctatcttccttccatctacccatctatttatccatccatccatccattcatatattcatctatcctttctatccacccattcatccatccaaccatccagctagctttccttccttccatccatctgtgcatctgtccatccatctatccatccatccttttttccttctatctaccatccatttatctattcatccatccattcatccatccatctatccctcctattcacccattcatccatccacccatccagctagctttccttccatccatccatccatccatccatccatccatccatccatgcatccattcgtgcatccatccttccattcatgtatccatccaaacaaacaaaaaaaatttttttggacatctctcatatcccagacactgtgctgtgtgtctgggatataggaagaaacacagaaaggatttcattccatgaacttccattgacaatcttctatatgccagtttagcctcagcccaagcacaaaatgtttgggacaagtaagtggatacaaactaaggactcagcatggtacccagtatgtgctctgcaagagttggctctcatgtcgtcattattactggcatcacgaccctggacaagttatctgaccttcccgtgcctttacacagattaaatgtgataacgaatttaaagtgcttggcttagaaaatgttaactcttattattagctattaaggatgacaagggtgaattatggaagagtgctgaaatgttctgttcatagtagaaataaatggggactggaaggctgagttcttgtacagttcgcagccattctgaatgtgttaccaaaagcactagcccacactcccccgtggaggaatcatagctggctagaggcatgttgccacctcctgaggaagaagtgagaccccaggggctggtgaccactctcaagctcctgagtttttgagtgaagggatttgagtctcttgtggcttctggttttgttaccagaaccatctcccctgacagcagacagacttccacaagttctgaatgcaagcgcccggggtcagaaggttgcatggagaccctgttactctctccaagcagccatagagtcagagactgttgggacaccagaataaagcttcaaggtccccagtgtccagaagcgtcaatgtgtgcagatcaagagcttgctcagtcaacattaataaatggccatggtgtgcctggtgtagtgttgaaggatgggaaccctacagtgacaaagctgccggtgactatagtgatcatacagagtgctgggggctatgggaacccagatgaggcacctagcctgggggcatggagggggctgttaaaccaagacccaaaagatgaataaggagctgacagggcctgggcctatgtgtaaggctggatgagccctcaagggtacctctgcgtcaacggaggcatcctcagtgcagacatgggtcttgttccatgcctggcacagtgattggtgcgatgttccaggcatgtccaatctgggccccctctgggcgggcctgccaccgccctgtgctttttgctcctgagcccaggtggccacttcttcctcctctatcacagcccccgcctccctccaaggagcccttcctcttccccatgggcctgcggcacctctggctcagtctgccttcctgtcccactggaggaatcaatgtttcttcacctctgttttccagggctgaggcttaggacttgggggcctaagcctccctttgtcttaaaccagctgtgaggcagtgacatgtgaatttcacccatatcacttccaggctcccagaagtaccatctgaaggtgagaaggggcttccgacagtcacaggccacctccaccattcagctgattctacaaatgtacagaaacccgagaacccggtgagggccacaggaaggcccattgaacgctgagcaggcgcccctgcccccggaatttaaatgttgaagtccgaacccctagcacttcagaatgtgacagaaacttccagcaaacgtctggaggcaggaaccacgagcacgtgttcatacaactgtccagcctgtttgatgtgaaggacgcagggcagacagtcgcgtatcgtgcaaggtgatacagcagcagacataactggaacctcattattgagtacctactatgtgccacactttggcggccattttgcatatatacttggtttggtcctcttgtgatcctgttggtaggtatctgtactttacagacagggaaaccaaggctcagggaggtaagtccctgaagattatccagctaagaggtggcagagctaggtgctgcaccctggtcacctggtcccgaggtgctagtgctcaaatgtggttctagctgggcagggctgttggtgtgccactccttgcaaggcgaatgcaccatactggatgccagatacttgatagggaaccccatcctgccctcaggggcccacagacctcacattgcaaaccctagggcctggtgtcattttatccagagcacacactgggagtcagacacacctgagcaaacctggctcttccacttgcctgtgcaactcactttaactcttcgtgcccagttttgatggtaaaatgtctatcgcatctatgcctatgttgggagaaagattaaacgagctaagccattagttcagtaactggtgcatggctagtactgtctcaatcatcgcagctactcagctgttacccacacagccccttatccacagcctgaccattcttttttcccttccaggtttattgaggttgaatttccataccagaaaatgtgccgttttaggtgtacagtactatgaattttgacaaacttatataatcatatcaataccatcaccatcaagatatagaataattttatcactccccagaatcccttgcgtgccttagtagccagtcttctcctgccatcttaatctctgacaactaccgatctggttttggtctgtatagttttgccttttccaggacgccaggtaagtggaatcacatagcatagagccttttgggtctggcatcttccacttagcataatgcatttgcaattcatccatgttgtagtgtgggtcagtagtttgttcttttttactgaggagcagtattccattgtatgaataaaccacagtttgtattttcatattcagcatttaggctgtttccagtttttggtgattataaatgaggtgtatttttttttaacatgtcttgtaatttttggttgattgttggacattgtgtatagaagagctataaataatattatgcctggaaatgggccggcttcctctttcatcaggctctgagtgtggcaagttcagtccttctaatcatgaatcgagctgggtttggcttttgttgcctaaggaacaaattggaccctccgacttgtctcgtctgacttacatggcattttccatcacataaaagcatgaggctgggcatggtggctcacacctgtaatcctagcacttggggaggccaaggtgggaaaattgcttgagaccaggagtttgagaccagtctggacaacatagtgagatcctatctctacattaaaaaaagacaaaaaacaaaaaacttaggcatagtggtgcatgcttgtggtcctagctactctggaggctgaggcaggaggatcccttgagtccagaagattgaggctgcagtgaactatgatcatgccactgtactccagtctgggcaacaaagtaagaccccacctctaaaaaaacaaaaaacacatgacatttaacctaaaatctggaatggcttctttaaaaatatagaagttttgctgtcactggtggttctgtgttacacatgttagcagttggcttttatggacaagtggctgcccaccttggccggggcctgtactctgcttttctgcaggctcctctaatccttaatgattccccccaccctgcctctttcttttatgttattttccttgttcttacagatggttgagttggtggtgtggagatcctgaatgatattcagtgtactcttttttaaaaagacaggaagggccaggcatggtggcccatgcctgtaatcccagcactttgggaggccgaggagggtgtatcccttgagacaaggagttcaacaccagcctgggcaaaatagcaagactttgtctctacaaaaaaaatgaaaataagattttaaaaagatacggaaatatatgcatcacttaaaaatatatttctacctcaatggttagaattaaactgataatcaaaaaaatcaaacgctggggaacactacttttcataaaagtaagctcagagaaaggcttgcttttctagatagtgtgaatagcataggtgattgtgtgccttctaccatccagagatgtggttttaatgatggacaatggatccccacagaggagaaggcattgtactgatgtctagaaaggatgaacatagaagaggccaggttttcttacatccacctggagagtgatattacctgctgggaagattcacatttgacattttactttgaggacacagctttctgagtctgttgccagatggctggtgtgacagctgatgtctgccagacggctgcaggtgggggtttagaaacacaaacacagccacacgtctggatggaggctgtttcccagtggaaggcagggccccgtgactctttgatgaggttggccagagtcattctgtacaccttggaggtggggcccttcctgtcactctcagttgtccatggaaggctggggaaaggtcaagggtgagatggaaagcgtgattggagagccaggatgctcctactcctttgtcattcacactcgctcagttcatgcattcacttaaagaaggtgatgggacccaccctcccttcctccattcctcccttcctcccttcccctcccctccctccctcccttccttctttcctctttctcctttctttttccttatatatataaaatttcaatagcttttgggggtataagtggtttttggttacatggatgaattgtatagtggggaagtctgagattttatcagcacccctcacctgagcagtggacattgtatccaatatgtaattttttatccctcaagcccgtcactcctgtctccctcctgagtctttaatgtccatgatactcctgtgcgtgcctttgcctacccatagcttagctcccatttataagtgagaacatagagtatttggttttctgttcctaagttacttcacttagaataatggcctcaggctccatccaagttgctgcaaaatacacaattttattcctttttatggctgagtagtattccatggtgtatgtataccatattttctttattcactcattggttgatgggcacttagggtggttagaaaaccttaagactccaccaaaagactcctagatttgataaatgaattcagtgaagtctcaggttataaaaccagtgtccacaaatcagtagcactgctctacaccaacaatgcccaggctgagaatcaaatcaagaactcaatcccgggactctttctggcactgggaagacaccggtggatgaaagaagatgcctgctctcatgcagctgacatctcacaggggggcggacagtaccaaaggagacaggccagagaacaagagaattctgagtgggcacaagaccaggtgggctccaggcctaaagagggctgggctgggtgaggagggtgatgggcatgtgcttttggatggcgtggttgagccccctgggggaagaacattgtgggcaggggacagctggggcatatctctgaggtgggaatgtgctttgtggattcaagtgccccgtgagggggcatggaatgagccagggcctgaggatagttcccaccctctggggccctgagggctggaaaggtgttcgattttactttacctgcaaggggcagccatgggggagttggcgtggcttggtgtgcatttagcccgggtggctgtattgaccgtgttccttccatagcagctggggctggttgacttggtcctagtgaggctcctccaagaaacaggctttttcctcctgagccatgaggctcgtagagggcctctgccatcagacaggtggggtttatagcaggctgtccgacggtgtgctcattagaccagatgctgcttgaccagagggggccgggatgtgggccaagccccacccccacatggccagggcctggagacccagtgcttgtcctaggggcagggatgaagtgggtgcccaggcctgagagtgggagcagagggggcggtgaggatgaaggaggagcctcgtggtggccatgccccctctgtcctgggccctggcatgcagctgctgtctctggacacaatgtgctccctctatctgcctcctggcccagcccagctgcacttgctgagcctgctctcactttcccggggcctcatgcactggggcctaaggtgtaccgcgtcccgctgcacgggaaggccagagttggcctcatctccgctctaccaggggcctggcagggctggcaaagtagatggtgcccagggggttcactgggtgaatactgttgattgactcacacagaacagaagtcggaaatgcaggaggaggggcgcagacaccctgagaggccgggacagcccaacccccttgtccagccgctcaagagtctcagcccctaagccgtccctgggctgcacacactccgtggactacaagcttggcaaagagatttccttctcgggagagtttgtgctttggattcaaatgggggaggacctattctgactttcaaatgaggtgctgagaggaggggctgaaattccagtgccctctgcagagatgattggggcctcaagagcactgaccagctgcggctcctcagcccctgcctgcctagagcctgcctccccacccccatccagactgtttcagtttctgctgaaatctactagggccttgaggacggccctgcccgttttttatctttttctgtattccagtagctctagttcccagttctgccctcaatgggtgttatcacacataggaaatgcctttatgaactgtgcattattacataagtatcactcagcaatggggtcaaatattatttatgtattaataaccgccagttttgcaaatggccttaggtagcttacttgtgtacttacacttcactaagataacaaatagttgagggaattagcacaaagagcacataatgatagcaaaagaacaaaactgaatgtaagatgaggagcatcctagcagccaaagtgaaaaggagaactggattggttacagtagtcctgcgacccagagataaagcaagttggtttcccaggagaatcatggctttctgtggatgctgggatcgagtgaaatacagcccacgggcctccttagtggctggtgtaaaactgcacagtaatgccctgctggcctaaggaaccaagaggtagaccttgatcctgaggagaccacgttcagactcccacacccatggctctgaggggggtcagagcaccaggagggctgggaggatgtggggaggctcctaggaggtagcacctgtgcccttgcctactcagtctgtgggggttgagggctgggttcccactcaggaatcccttcagtcacaggcaggcccactgccacgtggctaggggtagagggtggcgttcagagtcagccccatctttccctgtccctcctggggtcaggtcctggtttgccactatcactctaccctggattctccccatttcccagtttcccctccacccccgagaaatgggaacagaacccccatctcccaggaatcctgggagggagaacttattccaagcccctggagagctgggcacgtcattccagcttcagttatttgaaggactgcactcttgacactggtatacaccacacatctcatgggaggggacggggactaacatttgcagagaccccactgtataccacatgggctacctgggtcctaggatctgaggcccacaccatccttacgcgatgggtctctcacagggatctcctgtttcccagccagggtcttgcaggcttggggaggagggtgcccagatcccacaaccagcaggtggcggggctgggattcaaacccaggcagtctggctctaaagcctattccctttccactaagccaggctgcctcggcagcctccctgacgagatggctttgggttttgctctgcttgttctcccacctgggtgtcttgcaatggtggcctatcacgtagctggtggtgaggcaggtggctgcagggagctgagacagggctgcagttggaggaggaatttggagtgccagagcctcttggggtggatgcacaggactcctaaatgctgcccacctggaatctaacaggtgcccctgcagctccaactgggcaacaggccggggaagggaccgtctgccggcgtcaccatctccgcccagcccagctgtcatgagaggatgtgggaactgcgcggggttagtccttgacaggtgggactgtgattcacccctgccgtgctcactctcccggcacactttaattacagtgaaaagcaggggagagactggtcctgtggctcctgggcttgtcctagctggctgcagcctgggccaccaggccaggcgatgggctttttgccaggagacctcctccaccctgcaaaaaacaaaacaaaacaaaaaactccaccttgagtcccatgtgcttttaaaagcagacggaaagtgtgggtgtgaggtggggaagccaggggtgaaaaagacacaaaacccatcacgtgtaagtggaggtgcaagagctgtcattttcctttcaaaccgagggcggttttgtcacttccccagtcgatgctgctggtggcagcgtggggtgctggttgagcccacagaagctggcggcagctcctggatttgactctggctctgctgagcgccctggcctggaaggagtctctcaacctctccgtgagatgggagggcagaaggcagtggggatgtgggtggcgcacaggaccttgggctgcagacgaggctgtcatcctgctgctgagtgcacgcaccaagctcatctgcatcatctccccaggtccccaggcccccttgggtggggcgggtgttggccccatctgcagatgaggaggtgcagggcactggggagtaggtggggggcttttcatcttggctctttccctctggacaaaggcacttcaggtgtggctccaacacctgccagccaggcagcgcgcttcacctccatgagcctcagtgtctgcgtctgttaagtgggggtgattgctttgaggtttaaattaaatgttggcaaaaacctacctcccgtggtgcccagcacatcacagacccctaggaaataatgaatgaatgaatgaatgaagcaggcaagaaggaacagctggaaaagctaactggttatctttattcctgaaaggagaaatttggggaaaactgttggtctcacacagctgcagggcactcggggctttcactgggcaccctaagggcctaaatggggctgggggcagctccgtggaactcaatggttttaactctatggatctggactgtactttgctgcgaggtaatgagttcactataccttggggacatgcacggcgctctggaaggccccttggcagggcttttccaggcctggcccttctcagatgagggaatcaagtgactatgaaatttccctgcagcctgagctctgggaccttccctccccccacgcccaccctccggtcttcttgctcttcaggcacagagacacccgttaccatcctctaagcatctgttgagcaccagacataggcagtgataacccagcgggatccatgcactggcgggcggggcggagttggggggttggtacgcggtacagggggagccaagagagtgggaacctcaatgtccctgagtggagggcgtgggagtgagcagggagggcttctcatgggaagggtctttgatgttttgatgttccagtggatttcagggaatggggcagcagggaagggtgtcaggatggagagatcagcatttacagaggctcagaggcaggtggtgaggggctgtgttctgggagcttctggataggggtttgaccacatcacaagataaatagtggggatgggaggctccaggggagttaggatcactgagggcctaagacagagggttctgtcctgctggcaggagggtgtgggggtgctcagcaggggtgtcaggatctggtttacagagtccttgagtccacaggtcatagtgtgaccctggcatcgggtggctgcttgcttctgtctcctcgtctgtaaagtgggtacagcagtgcccccctcttggttgtgagactgcagtggtgatgccacacccggcctggtgcccacagccctgccgccccagccgtggatctgccttcccctccccaagcctaagcgtgaagcatggggctgccggcatgggaaccttgccgaggtctgttttcttaggcagactcatcacctgaactgaacattggggaatctcttcgtccaggtcaatttggagctggtgccaagcacccaaggggtgtggaggctcagcagggaccccggcctggtgctgggtacacaccacagtgatgacagcctcgccgccagggcatgatgtccttttcaccctcttgtcaccctcccaagcctgggacagcggagaggctggaggcgctgtgacccaggccctggtcaggggccagccaagcttccgcaggcccagtgtccggggcaggaagcgctgccggccggaggtgggacagggcagctccagggctggggagaggctggcacaaggccagcacgcccttgctgctgaacagccccattgatgggcaggcagcgggcagtcagggtgcagtggcctctcctgttgtcccctggtcacccgtggctgagggcctccgggcctccacccctgcccacagctgcttggcaagtcctcccaggctgtgtcactgtgacctggatccagctctcccctgtccctgttctgatctgcttcacggggggctggcaggcctgcagagttaggtgctggatgagcctcctgcagctgccgccgcaacgttccaccgagctgggggcgtcaaacaacagaaatgcatcctcttcctgttctggaggcagaggtctataatcaagggagttattgggccactgggcctcccaggagtcaggaggctttgggggaggatcctcctcacctgtcccacctccggtggctcctggcgaggctctgtgctcctcggcttgcaccacatccctccgtctggctctgtcttcacgtggcccctccctgtgtgtctctgtgtccagacctccgctcctctcttgtctaaagacacagggacgggattagtatgagctcatctttatgtggttacatctgcaaagaccccatttccaagtaaggtcacgttttgggtcctggatagatggcagctgccaccctgcactcagcctcctgaccagagtccctgctggtctcccggctgcgtggctgcttctgccccagcgtgtgtccctgtcccagaactgtcctgtgctcatgctttctgggtccctccaggcctttgcccctgcagtgtctcccgggacgtctcttgtctcttgtgcagacccgtcagaccctttggtgtccttcgaggcccagcctctctgtggcttccccaagaagcctcttttcccttcctgagtgcatgagggcttggcttgtgtgaccgccccccccaaccccgcccccggcaacgttgctttggctgctctggggctgctgaccgtgctgtcctggccagggcatttgatgcctgttcttgtccccctccagaccaagggctcctgaggttgcggactctactatgacacgtctcaggaacttccttctcttcctcatcatcagagtttgaggacctactgtgtgctgagcctcgtgctaggctttttttttttttttttttttttttgagaccaagtcttgctctatcacccaggctggagtgaagtggcatgatctcagctcacttcaacctctgcctcacaggttcaagttattctcccacctcagcctccggagtagctgggattacaggcacccaccaccatgcctggctaattttttttttttttttcatttttagtagagatggggttttaccatgttggccaggctggtcttgaactcctggcttcaagtgatccacccaccttggcctcccaaagtgctgggtttacaggcatgagccaccgcacccggcccgtgctaggcttctgatagatgtttgtcactgaatcctcagggctcttctaggaggcaggagctgtgaccatttccatttgcaggagagtaaacggaggcacctagatgttaaatcgcttggccagggcttcaaagctgggactgaggcacagatctgcacaggtttgttttagtgagggctccttgagggctgcccaggtacaagccccaggtagccagagtggagttcgttcattcatccatccattgattcatgcgagaagcgtttctggagcaccttctcgtgctctgcctcaggtacctagctgcccaccgacagccctgccctggcctcacggacttgggtatgtcagagaagcaagacagatgcttccctgctcctcacagctgcaaggggccttggagacaagtcctggtcttgccactcacccagtctgtggccccgaccaggggctaccctcagcacttgctggcagagttgcctcagccagcccatctctaccgtcccttccggcctgaggatgagcatccatgtccagcagccccacttgccggcacccttggcagttagctcaggggagggactgggctcctgagtcccaagcaccctccgcagaccgctcttggctgacaacggctggtcaggtgaggtgtgtggccccccgaggccaggcccatgcggagccctcatgcaggaaggccatgtgtgaaggccacacggaggcgaccgtggctctgaatccctgccaagcctgtgccccagccctgggaaagaatccacaggcattctccaagtccggtgactcagagctcccaagccgagagcacagggccagcttcctccactcagtaggggctccgaatggcccacagagccctggcttacaggcgggcccggggcctgggagggcatggtgtcagtctgcctacgtggacccagcagcattcacacttggcaagaggacagccaccagggtctgggtatgtgggagccaggaggagcttcaggcagagcaaacgtcgtaaaagaagactcttcccacccatggaggacacctcccgggccagccaccctgagccacggtggcaatggttagtgtctgcgctgatagtcatgtgtgccgctgagggggtcccctgagatgctggacgtggcccctaccctgaacacacagcagctgcaggtagctcagtctgggggagaggcctcttcatggcaggtttctttggtgaagaccttcagcccagttctcctgccaaacacattgcaggagagaaacacgaagaagcatatgtaagtttcccaccgctgctgtaacaaatgcccgcaaacttactggcttgagacagcacaaatgtacagacagcccccaacttacaatggctcaacttaacatgttttgacttcacaacagtgtgaaagtgacatccatcctgcagaaactgtactttgaatacccatacaacctttccaggtcagccaggctcagccacggtgtttggtggttagggggagtaaatgcatttttgactcaggatatttgcaattatgttgcatttatctggatgtggccccatcttgggtcgaggagcacctgtttggtcttacactttgagaggtcagaagtctgagatgagtcttaagggactaagctcaaggtgttggcaggtgcggttccttctggaggctctaggggaaaatctggtcccttgcctcccccagcttcttaggggccacccgcattccaaccccttccctcacatcactccagcctcccgcttccattgccgcctgtcctggctcctgcttggtcgtccaatctccctcttcctcctgctctacagggacacgtgtgattgcattagggccatctggataatccaggataatctccccatcccgagagccttcacctaatcacatctgcaaaagccctttgaccacgtgaggcgacgttcccaggtttagggaattaggacatggacaccttttaggggctgtgattcagcgtatcacaaagagcttctcggcaaatttcaggtcagggcagctgtgcccaaaggtgcctgcgccctctctggaggatgagtctggttgagctgcgattcctaccatccacccccacgcacacccctgacgtccaagtccaatgctgcctgactgatggggaaagagcgagtctgtgtcaccctggggcttgtggctggggcgagtcctcagctctcctggctccttctgcttggcatggcacctctggaatttagaaatgaaatggacatttagaaacaacggctagaatttagaagtgaaagtcaatgcccgctgtgctctgcagtgcaacttacatccatgctcaccttggaacttcgcacctgccctcagaggcaggatgtctacctttgctcaggtgatcaaggaaacggagacttccagggaaggaacattcctgaggtctctcagtgaacgcttggcaagctagggtgccccctaggcacacccccaacacctctcccaccacgtgtgttccacagacgtggactcgcggccgccatggacaggacgctgtcctcagtgctggcacatctgtgaacaaggctcgctgccacagcctgcaggcgctcaccctcctgcgagggagaggaatgtgggtgctgaggctgggggtgagaagatccagggtgagggctccaggcagaaggaatggcagaagcagaggcctgagggagtctgcgcttggtgtgctccagggccagggagggctaggggcggcgagaggctgggggtggggacagggtggaggaactggtgaggaggaggctgtgtcacatggtgggggggcttcacccccatagaggagtctgggtttcattttccgtgggctggagactgctgtggggctcggcatgcacctcacgtgacctgggcctgggctggggcaggttcttggggctggggtggttggggtgcaggtcttcactcctggcagggtgatccttggctgagacagcttggagtcaccctacagcaaggcagaagtgggggtgggtgatcgacccttgctgcaggtatggaccccacactgtgtgttttcatgaagctgggagtgacagtacccacgcgggaaggaggtacggactgcggtcccctaagagaccctggtagagctgatgcctcagttcagccacaggtgggaggaaagggctttagagtcagagcaagtgagggattgagaaacccagtggggtgtgggagggaagggcctgtctttaagatcctctacagcagcaggtctgagactcctgtccacccacgcccccggggatcttgttaaaatgcacattctgattcagtgggtcggggtgaagcaggaaagtctgtttctaacgagcccccaggtggctgacgaagcgggtctgcagagcgccttggaaggcaggggtcagtggcttcagtcctttacctcctgtgagccctggacccctgctgggaggatggcaggcgccccaagtgacaggtggggacactgaggctgcaagagcgaaaggagctgtctgagatgtcgcaggcattcctacagggtatgactggggctggagcctgggtctgtatccagcgtccgccctctgccaggccgtcctgagagctgaagactcccagctaaggctctttctgggggtgagattaggggtacagcttgttaatggaggagcatccacaggccagtcatggctcagaggagagggagagaacgcatgtttagtgagcaccaactgtgtgcctggcatttcctttgtccttgctacaggagagcatccttatctttgctccttcagtgccaggagctcaggaagggcctgctgccctgatgtggggggctctcagccaggccaaggtgaccgagaagtgccagctgggtgtgggatggtttgccacatgcaggcaatcccgggggccctgtccgcaggctctgtccacgtctcagctcctctgaggctgctctccaagaacaggaccacagaggcacccgcagcctcctgcagacagtgggtgttctccagataggaatgtggtggcccacagccagctcccatgatacaactgcctctgcttctgtccaggggaggatggaggagtcacactgagcctggagaaatcagcttcccccgacccactgtgacccccgaccctggcctaggcaacactctccgggctgggcatgttgacggcagacttcagccccatgaagcaaagcatctagaagcatatgaggggtgctcaccctgaaggactcaaaactcacccaatccactgggccacctgtctagaggcagatggggaagtcacaccctgtgcagggctggagcctccaaatccaaacaaacccgagtgagcacaagcccctcttggctcccagcgctgcctgtggatgacatgacctcagcctctgatggggacatggtggcctggccactggggatggggcagagtgtgggtgaggcaggaggagggcaggatgtggactctgccacccccaggcttacgtcccagctcagccttttaccagatgtggccttggaccagtctctgtttccacatcagcaaaacagggagagccatatttacccagcggagttttgaggagggttagaataggtgttccacgtggaaggcacctggcacggaacaggctcctgggggctggtctttattcacagagtgtgtagcttgttggctgtggtcgtcacagcaggagagcaagtggatgggacaaggcggtgtggccgtgcaggcaggaaggcagcctgccccacctctgcctctgaccccaccccactagggcatcccatttctgactggctgagtttcggaggagcagccaaggcagaaccctggtgcccacacctgcctcttgcgttgggtgttgcttcctctgccccggggctggagtgacttcctagctgagtccccctctcactttctgcctagctggctgatgggacccactgcagttacccatgaagctgctgaaggtgttaaacgtgttcccgtgtgtgatgttggccggtgcggcagcccagatgggacatcctcttctgctctgttgtgggggtgttttggtgggacgtgctccctaaactgcacagggcccagcctgcaggaggggctcactcgggggactttctggcccagcctctgagtttcaagatcgggagactgatgtccagagaggggccactgggtgcccagggccctcgtcgtccacctccctgcctcacctggggactggccaggcccctgactgcgtgtgccattgcttcccccagaccctgacttagcccaagcccaggggcccaggtctccccacaggttccaagcctgttattttcatctgaaagttataagaaggcagctgtgggtgagatacatttaacatgaagttgtatcttgtggtcagtgctttctgtcaaaacattttgcctcgctgagctgggctggggaaaggggccagggaagccgcatttctccagctggaactcacagtgggagctggctgttgactaagaaggcaggaagaaggcagggctggcctctgatcccgcttctcccatctctgccccttgggcctagcctccatactcagctggggacagcgtcccctgctgccagagccgactgggaccttgtccagcctcacagcttcctgaggctccgcgtcaactctggggtgacaaccaagctcctccccaccttagtcccccggcccctcaccctcctctcaagagcccacgagggcggcacaagtgaaacgtccagggtgcagagtttaagaaggtgcccacacaggcatgttgggtgcagggctgggcctggcagtgaggctctccccaaactttgcgcaccccgggtcctggccctgctctcagccccttcccgcagcagccaccttggacctcctccttccccagcctgccttccttccccatcacctggcacctggcgctcccctacactcctccctgtccccctggtcagtcctctcacccgcccctccttccccagattccacagccccccaggggctggtcccccctcccattcctcccgttccttgttgtgtctgccaaccccagacagtgagctctgagggccaggcctagcacagaacctgacacctggggggtgctcagtgagcatgcttgaggggtggcagctgaacttttgtttgtgggtaattaggagcagacagtagggtcacctggaccttgtcagttcctgcagcaacagggattcagaggcggggagtgtgcacatgcgctgaggacacaggggaggtggacacggtcactgccttcctgtggtcaccgaccaacccaaggcagcccataatgatcaggtggggaggttgccacggacaaagtgcctgggcccagagaggggagacctgtcctcctggccggcttcatggaagaggtgacgtgtgagcaggccctgtaggatgataggagttggcctgtggagctggcagggtgggagttcttggtgagaacagcgagtgtcagtatcaggcatcttctgggagcggagggaagtgctctgaggctgaggattaggagacgggtgtggagggagggagggaaataaagctaaagggatggactgagatgcagtcggctgggccatgggctttgaacctgatctcagtagcagtggggagccatggagagttttacacagagggcatctgtgtcccttcagctcccattctgcagcacccggcccagagctgggaatctgtgccgtggtcagatccaaatttgtgttagaaattctgagtatcctcgtccggggcacacgcctagttttcctctctacgttcaagttttcacctgttcaattccaaccacagggcaagagatgtcttgtttttcattgtctttgtacaagtctccccttagtctgggaaatcagaaaaaagagaaagtgtttctgttctgggccctccctggggagtgaagggaattttatggggaggggagatgctttgataacccaaacattttgcagagaacccaaacatgggagaggaattcctccaggcccgacagaccccacacgtgctgagcgctgccttcccaggacgccttttctttctctctgggcgggcctcaccctgccccgcctcttgctccggcccgaggcctcatctgtcggggcacccgaggacggccagttcaggaggcagctgcagtcttgctggaggcgggctggggtggttttccagggctgttcactggcagctcccatccctccacgcacacagccccttcaggctttctgagctcacccactgctctcaagaatggcatttggcccattttaccttccaggaggttgaagctcaaggaggttgaaagacttgctcgggctcccggctggggggtgtggcgtggcgactggaacaggcccaagtggcttagatcctctgctgcaaggagggatgcctggcatggagtgcgggtgcgggggtgaggcctggagacccaagctggcttggcagggcctaccggtgacctgagctgccagggttagggcacagacccagctcgtgtctcagctctgccccctcctggccggggcttggcatgcgcctgagtctgtcctttgtgacttgggggatgatggtaaggtgacttcctgtcaccataagcgctgtgtgcaggggctcacttgccctcctggagtgtcaggtgacaattgccagcttccgcgtccccatgtgtgctgtgattcgagggtgctggaaggaaggagggcactgatagctgaggccccgctgcccctgccctgcgtcctggtcgattgctcgtggtggagatggcccctactctccctcactggggtttcagggagccgtctgctctgctgaagggaggagaagcatccagcgggcagcttggggatgctgctggcttctgggtggcggtgtctcccagtggagagctctgagactgcgactgctgtcctccttcccagagacccccaactccccggaggcccttggccccggctgagatcaatgcgaacagatggatgaaggactcttgtctccaaggatggggtttctagggtcccaggacctcctgttcgcatcttggtggaagcgccagtagcaccttgggtgagccgtgcccagaacagatggatgaaggactcttgtctccaaagatggggtttctagggtcccaggacctcctgttcgcatcttggtggaagcgccagtagcaccttgggtgagccgtgcccagaacagatggatgaaggactcttgtctccaaggatggggtttctagggtcccaggacctcctgttcgcatcttggtggaagcgccagtagcaccttgggtgagccgtgcccagacgcaatccctgagcagcttgggtggcaggctccagaggctattggagttggcactttgggctcggggcccagttggcagaggctgtgtccccacggagctgggaacagaaggccctgggtctgagtccaggttccgtgagatcctggacttgtccctgagccgccctgagccccaagttctcatctgagagtgggagccatgactctcctttcagcgcggtggtgaggattgattgagctgacttacgtcagagtgctgggaatcacacacaatcgtggctgagaagagagaggctggctttttgtgccgaggtccagttctccgtgtcagagtccatgtcatgacccactcccgtctggagcctcaccgagggcagatgtttagtctagaattgcagaaggtggggctggaagggattttagagtgaatccattcactgatccctgcgttcatttactcatgacgattagtcaaacacctactgtgtgcggggccttatggggagacctgacggggagggatgtgtcccagcccacctgcaacgtgcggtctgctggccgagagaagcactctgcaaataatggcatgggtggttgtcagggggcaggagtggtcaggcttcatgccgggagaaggtgcccgcactggatcaggaggccttcctgagcaggcgaccttcagactcatacttggtggaagttcaggcagaggtcggggagagttccaggtagcagggagcgcaggtgcaccggccctgagggcagcggagacctggcttgttggaggagctggcaggaggtcaggtggctgacaagacaaggctggtggtagtaggccatgtgggccttgcagccacggccagagggttggatgttgaagatggtgggaagccagggagagctctacacccgcacgctggggcagcattgctccctggctgcagagtctaatggaagacaaggaatcccagccgcccttagccaatgcgtgcagtgaagttcttactccctaccagggtttgtctggccacctgtgagccggccctgtgccttccacctgcaccttccccctgccactcccagctcctgagagcttccagagcaagcctgccacccacacatgctcccacatgctgcccccttgctggaaacacccagccctgccctgcaagcccagggttcctctgcggacctgctgccctctctgtggtccccacagatgccctaaccctactgttgcatccccatcacctgggcattgcgtacctgctgggttttgagctctatagtgacagcatcaggtctggcacctagaagatgttggctggctggctggatggatgttggatggatgttggatggatggatggatggatggatgttggttgcatggatggatgttggttggatggatggatggatggatgttggatgttggatggatgttggttggatggatggatggatggatgtcggatggaaggatggatggatggatggatggatgcatggatgtcggttggatggaaggatggatggatggatggatggatggatgtcggttggatggaaggatggctggctggatggatgtcagttggatggatggatggatggatggatgtcggttggatggatggatggttggatgtcggttggatggaaggatggatggatggatggatggatgaatggcctgccaggctgcctacccaccgccgaacagagcccatagatgaagaggtcatctgtccctgtctctctgtattggtgggcaaactgaggcccagaggcacccagcagggccagccagggtggggctggctaaggggttctgggactcttgatacagtgctctttctgttcagtctcctgccctctccagctttgcccacacccctgtccccatccctcagctagggcataaaatgttaatgctctcatttattctttaaaaattaatttaaaagtattttatgtggtgcctccatcacagttggaaaccatttaattaatcccaagtggcaggacaccagacagcttccataattgttataattcctctggcccagaggcctgtttcaaagctgttgctcctgggcctccaaggctctgtggacggcagtactgtggaaggcacgtggtcgtgctggggccgtgaagccatacccgcaccagggagctgttggtctttacagtaaaccccaggatacccagcaaccccctgacacacttctggcagggcagagcctgccaggggaactgcacctcttggccaagacgggctcttccattctgcctggaaattcacacagatgtggtatcacctgccatttcgccgtggcctggatgtgaactgtggcccgtgagggtggggacaggagggctgctttcctaatagagaaaaccagcccatggagcgctgccctttttctcacccctccgtgtgcacagctactcttgggtaggaaccaaggctttctctttgagaaatggccatctgtgggacaggaggcaccagtatgagtgacaagacagcttgatccaaggatgtgcacaggaaggaggactcctgactgcagtgcaacagctggtgtaggaaagttgtatgagtcagccacagctgcgtaacaaagtaccacgggcagttctggaggccggaagcctgagatcgaggtgcctgcaaggttggctgggttcatctgcagctgggtgggggcaactgtcccaggctgctctgcaacttctgggggctgctggccatccttggcgtgcatggcctgtagatgccccaccctggtctctgcctgcatcttcacacggtgttctcccggatagcgtctctgtggccatttttgtcaggacacccagtcatattgggctcaccaaatgacctcattttaccttgatcccttctgtaaaggccctatctccaaataagggcacattcgtaggtcctgggggttaggacttcaacataggaattttggggagcacagttcaacccataagagggagaaagcgaagaaccagctcagacgtgttcatatttgcaaatcctgggtttgggaagtcctgggaggagtgtctcctaaaagggagggtctccaggaagatgtcaagggagaaggccccaacccaggctctgccaagcagcagctgccatgcatcagggctgctttccatgaggacttgccacactttacagactaggaccttgaggcgaggagaggctgggggcttgtccggggtcagagatgctgataattaggaggccacgtatgaagggcctgtggggcactggcccaggtgctggggctgccaggccgcatgttcaggacccagaagggctcacaagatgagtgtccttaccttcattctacacaggttgacaatgaggctgggagaagtggatttgaaaggcccgaggccccacagttagtaagaggctgagccagcaccacaacccaggcctgtacgaccctcacactccgctgaccatggccctgccccatgtgatggagtgtggccatgccattgcacacagtggggcagggagactgggtaggagctgggactgagggtgtcaggatgtgagatgtttgctgctaaaaccaagacagtccaggcagacagggatggctggtcaccatagcagggcagagcctctgcgtgtcctggcgttttgtggagggcagcccggatcctggccagcgcctaccctggaaggtgccagcttcctctgggaaaggcgccccccaggtggcttctgtgaatcagctcaggctgcgtgccacagtctcctccaggcccgtccctcactgcggggtctgaaacagcctctttctgaggaaatggctttgaatactcctctgcactcttgcacgtgagcacgcttgcacacctgtgggtggaaactccctgagctccagctgcaggccccacttgcagctagaaggcaagaccgaggaaaagagaagctgtcagtcaaggggaaacatggggccccagggggcatttagtgacgccccctattcccatcctgcgcttgggacccattgagaaataagacgcacaagccaaactttagagatcaaaggtcggctttactattggcaagggtggctctaggtctgcagccaggagaaattgctcctccctcatccctgagccccatcattggccaggctggacaattgcacccatccctgctgcatggccagagcagctggaacaaaccctgcctgcaggccacagcatgagcagcaaaggaagcgtgaggagtgagcaggaagcatgccacatctcagaaaggaaaatacagatgtgcatggtggggaggatggtcttgttgactgcagcgtctcagtccttggctgtaggtctggcccgaggtctgcgtgcaggaaatgttggcggatggaagcatatcagtggtgtggagtagaccctgggagtatctgtggggagctggtgaaccttctgctcacgctgctctgttccagcccctgggcctttgcacatgctgttctttctctcttgggtgcccttctgccttggcctgttcaaggcccagctctaagctcctcctccagaaagccttcctagtcctgcaaatggagcaatcctcccagccctgaaccctgcggggctttgtccctctcctcgtcttgtgttggctgtttgtggccaggtttggccttcctggctggattctgagctttctttgctcattttctctctactcttcaggctgtaagaggcctggcagcaggaggtgcccatgctgcctggatgaacaagggaccaggaactgttttctgaagtgtgaggccagagggctctgtgatgacccagccaccatttcctgaggttccatgcagggccagggaccacatgtgcatgacatcattcaatctcccaggcagcttttcttctttattgacatgaaattcacacagcatacaatcgatcattttgaagtgtggcttcagtggtattcagtgcattcacagtgtgtgcagtcaccacctcagcctggtctaaagcattttcatctccccaaaaggaaactccagacccattaggcacttcccatttctcctccttctagtccctggcagccaccaagctgctttctgtctctacgggtttgcctgttctagatattttatgttgatagaatcatatatgatgtggtcttttgcttctgccttcctttacaaagcacaatattttcaaggtccagtcacgtcataccatgtgtcaataccccattcctttttcatggctgagtaatattccgtggtgtgaatagaccacattttgtgtattccttcatttgttgatgaacaattgtgttgtccatctcgggtatttgggaaaggcctcgcccattcaaggactgagtgcccactgggtgccaggctattctagtgctgggaacaaggggctgcagctcctaagggccagtgacagtgatgtggacatgggtctgcctcctcccctgagctactcactgtgtcctgacactgtcggcggagggctgcctctgacgttgccccgggccctgtgcctggaagagcctgtgctgggtttgttgctgctgccgccatcttgcccttcttaatcatttctgaatgattccattcatttcatttggcatttagccttgcagattccacagccggccctggtgaatccgagggggaagcatgccctcctacctttcttctttctttattcagggctggaggggcctctgggggctgtcttgggggccaagatgtgtcctttcacccttggaggtgcggcgtgaaagggaggtggaggcgaaccttgcagggaccttggggcccggcctgcttgcaccccctagctaaacacagggaagaagccctgcaaagcttccagcagccctcccttcaggacttccgaggccagggtaatggtgtgtcccctataaagtttcatgtaaaataatctgccttaaagaatggcctgagaggggtaattggccgctggcatgggcggtaattataacggttgttaacccgcagagctgtgagcaggcagatgggactaatttgatctcttccgttgtaaatttcagttgccaaggtggaaggaagcagtcattaccttgaaggtggtgatgcctgcttccctgggtgctggccaaggtctctgtcctggctgtgtggccttcagaggtacatggaactgagggacatagggtggctgcagacaggcctgggaaagggagggtggaaaaggggacagagcaacgttgacgtagtccccgaccctgtgggccccgagtagctcgtgatcctctgcctgtgttcttccgggcacggcaacaggagcattaggagggcagaggtcctggtcctcctgtctgcaacattggcaaacgtgccagtcgccctcagacgtgaggtgggctggttggcagcatgggcctcagggagtcacaagggcccataccacatcgttgctggggcctcctgcatttgggtgtcatgccaaagtgaaggcctgggacgttggaatcagctgggtttgggttcagcttcctgcctgaccactcgctcagtgagtgacaccgggcaaagccgatgacatgtctgagcctcagcttcttcacatgtaaggtcggcgtccctgtccccacactggaacagggcaggcttggtgcaggtgacgtgcacagccccgggttcagcacgggaagggctttgatgagtggatctccccatcctggcacctgctccctctgcacagagccttgacctccgtaagtgcaggcgggaagctcagccactgagagctcaggctctggggcagatgcctggcttcagacccagtgcggctgttttctacctgggtgaccctgcctgcctcagtttccccatctggaaaatagcccttaggaggtcaagaggaagcactgtggcagatggggccgccactagcacccacctagtgttgagtgggttggtacacggcgtagaataagtcctcaagatgggggcagctctccacacccaaagcacctgacttccttctagctctgctccacgaggaaggttgacaggccctgttggaggggagcccaaggcttccagtttctgtgagtggcccgaggccctgcagctgggaggtggcagtgccgggggtgcttcctgtgctcccctgtaaggcgtggccatgatgtgtggttgggaggattagttggcttctaggccctggtacagatccaagttgccccaagatgttctttctccttggcctgcaagtgaatactgacacgggaggtatggggtgggtgcggtgtggacgtggaacctgacaccctgctctgcctacgcacctagaggtgcacgtgtctgctgtcctttgacttaactaactatcaggcagtgccatttgcccccgccatgcccccagtgcagggcctgggatggaaggtctcagtggcttcctcatctgctgagtcccatgtcatggagccttctttgcagatgctgagcagttgtccagatgaggagggtcacaggtccccaggagccggggctagtttatcccatggaggcttccagaaatgacaggaaaccaggcgccctgcctagcactcaggccttcactgctggctggaagggagatgggtggatggagggccgagtctatgtgctgttaccttgcagcctctgctctgctccttcatcacctgggtccacagaacagccctagtgagacccactggagggcaatgtgcccccatcaggggctgggaattccagaaggggagtagggcagtggggagtttccttgcatgggagaggatagggcagtttgagcagagagtggacactgaggtgaggggcagaaacatgcctgggaccagccgagtcctcccacactgggccaggaggtgaagaggaagcaccgtgctggacaggaagcctggtgaatgggttggttttggggactgaggcctaaatgggaaagcgaataaaccccatactgcacctcacccctgattcccccgtgtactgactcactgtttatccttgaaaacagcagactacacggctgggagtctgcgtgaggagcacagtggatcggagggggagtctggaagcttttggctgtgctgtgcagctctgggggccacccagaccccagtctcattctccaggcccctccagtctgcttttgactcgcagatgacccctggggagcctcggcctgttgtccctcctgctgctggctggaagggtaggctgtttgccacaagtttcctcccagggacttggatggattagagggggaaggattttaccttgtgatgaaaatgtcactcgtactatgctgggccccaattttcaaagcaaaactttggagcggtagaagcttgttccagagagcagaggctgtgctgtttacatcttctcagtgtctgccatgaaatcttaaaacttcttaatgttggggcacaggacagactgagcagtgctgtactcctaagaccaatattaagcatagaaagtgcacattgggtgtgacttcaggacagctgaaggaccttaacttgtctgtttgtttagaatccttcatgctgttgttggaaggggctgcaggagctttacaaatggttccatcagtttacaaacgaggtcatggacctcagtgaggggcagtaacttgggggtctcctggcttcctctccagtgctcttccaggctattttgctgaaaatagctgagtatgactccagtaatgctgctggctagctgcatcactctagacaagtcctaggacctctccatagacaagtcctaggacctctccaaacctccgtttcccatctgtgagatgcaatgacctttaaaacctttgatcatagtatctcttttctgcttaaaatcttccagtgatggcttaatgctcttggggtggaatccaagcacatcagcgaagctcaaaagatctttggtaacccttctgcagcagacccagtcttccttcctgccgccctctctccccaactccatgctccagtttctggagttcctctgtgtcccctgtcctctcttttctctgagttttccctccggtgggtacctgcccttagaacactttcttcctcatctgccatcttgtctctggccaacttcttctcttccttcatgctcagtctagccaaaaggtctaccatttctgttgattttctcaaagaaccaactcttggttccatttatttttctgtgtagtttttctgccatctgtttcatttatttctgctctgatctttgttatttcctttcttctacttactccaggcttatttttctttttctagcttcttgaggtggagcttagataattgatgttagggttttctccctttttaataccagcgtttaaagctataaatttccccctttgcactgctttagctgcattatgatatgttgtgcttcagttttattcagtttattttctaatttccttagtgatttcttctttgagccatggattatttggaaatcttttgtttatttttcaaatatttgagattttcccaaatttctttctaatattgatttccaatttggctccattatgatcagagaacatacttagaatgattccaaccctttaatatttaccgagacttgttttacagcctagcatgtgatctatccaggagaatgttttatgtgcacttgaaaataatctgtactcaactgttattgggtggagtattttataaatgtcaactaggttaagtcagttgataatgttgctcaagtcaagagctactgatcttccacctacttgcactaataattattgagagtaggacactgaagtcttcaactgcagatgtagaattgtcttttccttctttcaattctgtcagttttgcttcatgtactttagggctatgttgttaggtgcatatatatttgtacttgttatatcttcctgaaggattgatcttccttctctttcttcagccacacttaaaccaatcttcccagatgtcagacaatgctagtttcttctaccatgagttcccagggtgtcttaatgtccatcataacattcatcaaactgtactataattgcttgaaaatttcatgagatcagggagcatgtcaagcctatttagctctttatggtcagcacttaacacaaagactatacatacatagtagtaggtgctctgtaaatatttgctgattgaatgaagaataaggtcatatctatgaattatattaataatgattatttaaaaaatttagtgcttgaggatggctatgacccagcccacttaggtatcatatcaggatttctgaacataattgagttgggacaatgcctttgcccaagggaagctgtcaggcagctccttcaagcctttgtgtttgggaccacacggggtcacctgtctcaggtggggcacctgtgccagtcctactttctctttggattggatctggcattggctcatatgttgttattgtccacctgtttctctgcaagcattctccttggcaaccctgaatccatttacgatagaattcccatgggccacgcctcgtgccggatgtcaaggacatatcagtgaataagaataaaaagcacctattgtgtgccaggcattctgctgggccctctatatgcctgtttcagcctcgtgatgacccagtgaggcatagggactcccatagctccttgcagacaaagaacttgagtgaggcccagggaggttaagcagtttgttcaagatcacacagcacttacgtggtagagctgaaaaactcacctgagtggttccaaatcccacgcctatctccactcctcccttctccccagagaggtgaggcatgccattctgatcctgtggatttgtgtggacactttcctctgatattaaaccaccatgtgtttaaaccacagtatctcaaaggaaaggggaaattttctgtagttagtacattttaaggcaaattaaccttgataacatctttaatgtcatgtattagactattttcccttagtaatgcattacaactgtcaggcccgatatgatcgcacaattaatgagattacacatgatgtaaatttcaattcattattacaatgtctgcactaatagacttgcgattaatacccacaaaccatgctagttcaaaaggacaacttttcgtgaatcacatgaaatgaacaggcacaggcaaccacaattttgatgaacggaagtgagaatgatttctgaggatgatcttgtctaatgatttactaagattagcaataaagatagagttaattaagagagtccctcgtgtcaggccaaggagccggaggagccgatgtgagacaggtcatcttgtgaatttctccctgggtcagccttttggaattcctggggaaattactcaccattaactctacgtccttcaggcacttcattcttccagctttctcacaaggattatgaaattagagttcattcagagaaagcatattgtgcgaggaaactgttctgtgaacttgaagaataataaaaacaactctgatttcttgagggcttatgctgtgtcggacaccgctcttagaggctctttcttgtggcatgcatttgttcacctgcttccccacaatggccccactactgtcatcagcctccactttatagatgatgaaactgaggtttgaggatgctaagtgccctggcgaagaccatgtggctcattaggaacaaatttcaatcttgtgttgttgttttttgtattttgagatggagtttcactcttgttgcccaggctggagtgcagtggcgcaatctcggctcactgcaacctctgcctcctgggttcaagagattctcctgcctcagcctccagagtagctgggtttacaggggcgcaccaccatgtctggctaattttttgtatttttggtagagatggggtttcaccatgttggccaggctggtcttgaactcctgacctaaggtgatccacccacgtcagtctcccaaagtgcagggattacaggcatgagccactgcaccaggccgaatcttgtgtttttaatggctgtgttttctactgttttgctgtcggaaagcgacccatcatgtgagcggcctcactttgttggaaacacatttggagcatgatagcagcattctccttcgttatagacagaaaagacagagacaccccttcccccctctggcttccatacacttatttgacattgattgatggctaccaagggggaattcaacttaattgcacacctacctcttatgccagtcactgagcttggtgcttgcagtatgttagcatacttcatcattgcgcaaggtttggagtgggcgctgtgtctacgaggaagctggggaccaggggcagcatggctggtgctggaactccagtctgtctcattgcaacactcatgccctgtccacccctgccgtagggagcagaaggcccctctgccccagtgatgattctggacggctgcaggtcagtcctgcaggtgtctcagcattctcattgtaaatatcttgctgagtcaaggtgtggggtcttctgcgggctgccactggccccgtgccgctggagcacagggccagtggggtgggtgtgggctgggtgtcctgcgccaggctgcctagactttatccccaggccctggagaggcccaggaggtcaccgggtcatggggcagggggctgggtgaggtgggggctgggtgatgtggtagaaagagcagtcaagcagggtcaggagatgggctcccctgcctaccgtgctctggcatgtccttcgccacccagtgagggcttggacaaagtgagcagacctcaagccagatggacgtgaggctcacccagtgggtggcttttgggccacaccagtgcccaggtgctgcggaggtccaggcctggccttttgttggcattcctcactgggtttcagtgcatgggccggagaactgttggactggacgctctgttgtttctttacagctcagctgtgaacttcactctaactggacataacgcccctagagctgcatctccaaacaagggatgaaacaactctcccaagtgtttggtgttccgagcagacgctgatctgctgttctcctgtttttcccaccactggacaatttcagtccccaggaatcagttaggattctgttttacccctggccccagttgtcaccaagaaatatctgggacattcaaaaaaatagccatgaacgaaaagtagtgtccaatgctagccaaagtctggcgaaaagggtattttcatgcatttttctgccagtgttgtaaatggacacgactcttgttttaaaaagcacaacccaccccatggctgcggaacccactctgtgcgaatttccctgaagggaatctgtccttccaaaccaggaaagcactccccacatgcaggtgtttgcagcaatgttatttacagcatccacaattaggggacagtgtcagcgttccagagtggggctacagttcagttcagtcaggccacctcccgttatgaaccatgttaaatcatcagatataattttgaagaccagtgtggaacagaacttagcaatacatagacagctggatctagggagggcctcgggtgccctgcttaggaattttgacctttgatgtccaaaatcctgctagatgggacactcccaaagggcagcgtggctgggcctgcagctcctggcacctagcatgctgatggggtgtgctggctgctggggggacccagtggattggcaggcatgaccctgaaggccaggactcccggcaggcggcaggtccaggcagtcaaggtgggagatgtgcacctgggcagtgaccaggcccgtgggaggcctgagattttcaccgatgccacttggcagtccttctcttgggctttattaattaacatgctgttggtcacactgcttttttcattgcctaggagttcactgctattgattgctgatgccagctccagcctccttggagagtctggctcactttggagcacaccagggcgggtccccttcatctgtgtccactcttcgtggctgcttgggacaggggcccacccaacttcatcttctcttccctgtgctactgtctagggttagggcaagggaaggaatgcgctccctggggcacacgtggtcggggtggggctgtcgaaagctggtgtttacaaaccaggctgcccatattgtcccactgtgctcacggataccatgcttgctccgctccacggaccaggctgcaagggtgaccaacacacgctacacgcccccccacttagcccctcagccccttgcccattggctggtggaagcccctggccctctgctgcctgagtcactgtcaccgcagtgtaattgtgagcgcagggacttcacatctgctgtttactggcacatattcataaagcggcagaacagagacctgctcacaacggaaccttgtcacagcgggtgttatagctccctttgtgttcatcacgacccctgccacagcctttctccctcctctccccatccccgtggctggcacttgcctgttctctgctctccttccagctctgctctgtctgcctgacagggtcttctccacactgtcttcttctgtctgttctcatcacatccttctctcctttctttctgtccttggcttatctctgtccatctgtctcttgttaaatggcttctggacaacagttctctgggtcaggcccttgctgactgagtgagcttttatagggacaccgaagaggggacagttcatgctcctctgaaaaatcagaggcccttgtccctcctcctatcccttcctctcccttcctctccctctcttccatccgtccatccatccatccatccatccatccttctacccatccatcttcccatctattcctctctctctccccaatccatgcactcatccacccacccatttatcatccatccatctatccatcacccatccattcatccatcatctacccattcacccatctaccccacccatcaatccattcatcccccatccattcacccacttgtccacccaactgtctactgtccatctacctactcagccactcatctatccattcaatcacccatctatttgcctactccctcgcctgtccatctatcatccatccaccacttacccatccaccccttaatccattaatccatttatctacccgtccacccacccaatacttgctctgtatatgtgctgggatgcagtgatggacaagtcaggtggggttagttgcttcttctgggctcacagaagcctctgtgtatccatctttcagaattttcatccctctaaattgtgaagtgttctctgcagctctgcctccctcatgggattgtgaaagcttccagagcttgggctgtgtcttctttatctctcagtgctaagaactgaggtgcctggcgtattgtaggtttccaacacattcaagtttgaatgaatgagtgaatgaggcaatgacctagtccagtcattcagttttacaatgaggacatgagctcagaggtgtgtgggccagtgctacacggtggctttgggcagtgctgggactcaccccaatctcctggatgccattttggagcttacccctgcatcttgctgtctctcaaattgtgagctggggttgggtgtgtgttgcaggaggtctttcttgggcttagtcctgttagagaaagccagtgggctgagctcttagcagatgtctagtgggctctcgagctgggagtggaaggcagcgttgggcacatctgcttgggctccaggctctgcgtcacatgctcacttagtgagctcacttggcagtgcatcctcagaggacacctcacagcctcacacctgctgcagctggaacggcaggaaggtggggagtctttgaagctgtcaacagggagggagaggctgcatgtctttatgggccagggactgtgtgtttcagaaagaaaactttggtgaagtcacggcctttgtcatcctggggtgcgtataactctgacccccatgtaggtggctgaatcttataaccacggttccttggaacctcctaacaccctgcacaagggcagggagaaatcatgatgtactctcctttccagattaggaaacaggctcagagagatgagggttcttgttcaacctgaggttgtgtctgaggccctgtctccctggttctagaggtcatcacccagctctgtgacacagggactgtgcctggcaatggttctcactgggagggggtagaggaggatggagtcagccaccagaggtggggaccaaaatctaggggcccagagagtgaactgccagcgagggcagggccatccctgcagaggtggtgttggaggtgccagtaagcactggctaaggcaaaaaagtgggggtgtctcatggcaggtccccaggatgctgggacccaagtgggctggcagggattctcccagggcccagagggaagtccacttccagccttggtgccaagtgggacctgtagtcagctactaggagctcctggttccacactgaacctaggattagaaggagacaggcacccagaggtgggaggttcagcctgatatgcgggttcctgtgtgaagggtctgcagggcctggtggtggggctctgtgatgacagtccatggcccagcatgaggcctggcacttagtagatgctcagtaaatcactgtggactctggagcagaagatgggtgtgagtgtgtacctccaatctgttccctgggcctcctgccctgagcgtgctctctttgctccggtggcacaggtgaaacgatggcccccgatggctttgggaaggcagccctgactgctttatggcttttctgggtcgtgtttgtcagggagcccaggggctggctggctaggggtggggttgctggaactagacaggggtttgagcagtttaagtccgacccttatgatattttagcaggactttcagtaatgaatttttcattagcagggaagctcagcaccggtgaaggtctccttgggaaagcataatggtttcatcagataaatatttaaaactcaaggatgccaatcacagcttcccggcaagaagcccctccctgttccctactggcagcccaagaagtaagtgtgcaccccattacctgcaccacctttacccgcaccacttctctctctctgaaatataagaacagttctcggcactggctttgtgccatgttgcgagcatgagttgagatctctttcttctgttttgttctctgcacggaccccaccctgtggcattgtaatgaccttggaaagagtccctggtttctgcttagcctgtcctggtccagcatctctcggggaaaggccagggcagtagagagggtcagtaggaggacaggacacactcacctcaatgtgagctctgaccttggacgtatccccccatggtaaggcaagaggacctacccagcgctgccttccggctcccaggtccagagcctgccaggtacccgctgggggctcagccccctggctttctcccccaagaaagaccccccaccaccaaatacagccagccccagctcccagtgaaagagagacaacaaggtgcaggggtaagcatcagcgtaggattcaggagattggggcgagtcccagccctactcagaggctaccgtgcagccccggctaaggcccacacgtctctgagctcgtgtcctcttttggggtttctcttcatgtcacctctgcaaaagcaccagaggccatctgggagcttctgcacaccaaatcggggaagggcactaattaagtaagagagctctgctagcgtggggtggaaaagtgagagagagaaagagagagagaggagggcagcacagggagcatctctgaaactgggggcctggtccccacagcacgaggagccctggggctctgcactgaaaatccgaaccccagagtaagtgaaacccagacttgacataatttcttggccaccccatgggtggactcttttacatgataaggaaggtttatccatggtgatatttagcacttcttatatttcatagaatattaggtggcttttatcaatattttatttatcccaatctcatcttttgtttccaaacagtatcaagtgatagaaaagcacatacatacacagaaaaaaaaacaccccacattttactgacaacacccaatctgttctgtatgttggtccagctaatgatgtgttgttcatttgtttgcataattctggatttgtggaaggaaccctgggctcgctgggaggaaactgggcctgaatcaccactctgtcctcacgagctggagcccaggcaccagcaccagagagagggtccccttcactctcccttctccttctctgtctgattttagcctaacccctctgtgcccttccgggtttatggcatcccaccccgccccaccatcgcacagatctctctggcttgagacaatcttagaacctctttggacaaatacttctgatacacaacctatatttgtcagaagaggctaactgctacaacaaaaatccccccaaagttaatggcttatgctataaatatttattttttttgttaacgcggtcagtcagagtggagggtccaggtgggtggatctcctgcaggtggtgacgcagggccccaggtgccttcaccgcgtggctctgccgtccccaggggcctcagagtccttcacttctcctgtgtgggtccgagggagagagcacggagggctgaggaggtttgcaacaaggaagtgaaagattgagttgatggcagctttggagcctagggtctgggcccccagagcgcatgaaaccttgggtaaatgaggaaaatatgaacttgacttcagcggcgctgggaaacgccctctcgctgtgagcccgaggaacaggaagtgcctctgtggaacgcacaggatttctttgcttccaaatgtgctgtgctgcttttctgagtgagatccaggaatcaagggccatggggcttcctgggtgatggcaggcccactggcaggaggcaaagcttccttggctgggatcctgcaatgctccacctgccctctgccctcccttccttccactcttccctgggtttctcggctgcagccactctggccctctttctgtcctttgagatgtccacgcttgttgctgccccagggcctttgcaccagctgtttggagcattgttccccatcttcacatggctggctcctccctgcaggtctcaatgatcatctgtcagagaggctctttctcctgccccctggccctcagggccactcacccaggacaggtcccccttcttagctgtatttgtccctgtggcttctcaccaccagatacagtatgcattttgctgccttattcggtttgttttctgtcttggcccctgcgttagtttgcctgggctgctgtaacagaatatcacagactgagggcttcaacaacagacatatgtttgggggctgggaagtccaaggtcaaggctctggctgagtttctggtttctggtgagggctcttttcctggcttgccgatggctatcttcccaccatatcctcacatggcgttggctcagtgtgtgagcatggagagagatggagagagatggagagagagagagagagatcaatctcttcctccacttatgagggcacagatccactgtgaggcccccaccctcgtgactacttctgcacccactcaccccacaaagccctcacctccaaataccgttacactgggaattaggatttcaacatgtggatttgggtcgggggatgcagacatccagtctgcagcagcccctctctgtgctgtaacataggcttcataagtgcaggcctggctgtcctgttcaaagccatgtcttcagagccttacagggcacctggcacctagtgactctttgttgaatgaatgaacacgttgatgaatgaatgatccctggatctctggagagggctccgggcctggcctgctggctggggccaggcttgtcctggggcgaccagccagccacttgctctgcagaaacaatgtgctgagtgcttggccagaccttttatctccccttttctcatctcatccttcccaatgagcagagcagaggagcctcactgtagagctggggacggtgggctgcagggaggggctggagctggacttgcaccctgtctccttccctgctcactacggcctggggtccggctggagctcttgctgggcccaggtggtgcagccacacttcctcctccacccgtgaccttgagtgtacagctggggtgtctccagccacgtgtctctgatgcctgccccggggactcgggagggaccagctcaactctgcctccagcgcttgacctttgttcctttacttgaaaaaaatccaataaaaaatatgaaatatgaccagatcgacatgaccagtggttcctaatcccagatgtgagaatttggatttttctaatgaagggagagagcagatgacagactcgtaggcactggcagcttgtctgagactgggaacgttggcctacaggttcccatgttggcagagaagcctggctgctggagctctggagatggaggcgtctgctaatggactaagtttccggaggcgttgattacgcacttcacgcggaaataattgctaatcttcaacagtgctaattgagtgataattctgccctttcaaggtgatttaacctgtcagaggcccaggcttttaggaagattacgtgagataatacaagctctactgggggaaatggagagaagtcaaatacctttcttggttgagaggagagatttcattttggtgtgatgcctgccatacactcacccactcggggcctggctggggaatgaatgctggggtggggggaggtttctcatttcaatccctgagggcctcgggccttctccccatcctgccttgtgtttggcgtgggtgggggcttctgtgcacactccagtctgaaagcagcagattctgtctgtctaaacacggttcaaatgaaaaggagcagaagaccatggttcctttggtttgaggccatttgcaggtgggcctctggggtctgcacctctgtgcatgcttcctcctgaaaatatttgtgtaccccccattcccaaggagaggagtgcgctggctcaagtttctaagagtggctggagagaaaataatacatctggtctcatggatgcggaatctgttttcacaggaaagggcacagagaatgaatttttcctaacagcagtgtaatttcagagctgctcagagtacatgcccatagtgtgggtgaacaggccagctggtttcacctggttaagaagaggggccgttgatggccatttgcggggcacctgctgcatgccaggcacttgcttacatgatcaccgattctaacagtagcctcctaggctgctgtcagtgatcccattaaccttattttattgatgcaggaattgaggctcagagaggttagcgttagttcccaaagtcacactcctgagaggctggcattcttgttatgatgatgataattattccatttcacagaagaagagattgggatgccagagtactgagcttgccaggcccacgtgccagtgagctcctgtagctggatgcattcccgtcccagatggtgactcacagtctaactttcaactcttgaagtattgcgcctttgacccaccatgcatgactcgtgtcctctaagtagcgtttctatttgttaagtcacagatgcggatctcaatctgaccatctgctgagtgtggggatcagcatgaaaatagagaaattaattttcctaaatacagtttttggaatgtgttgagattttcttcatgagcgattttgggggaatgtcccatgggcaatagaaaagatggtttattttgctttaagttataggttaccactatgtttttattttttatctttatttcttttagagacagggtttcactctgtcacccaggctggagtatagtgatgtgatcacagctcactgcagtctcaaactcctgggctcaagtgatccttctacccaaacctactgaatagctggaactacaggtgcataccacaacactcggctaatcaaaaaaattttgtggccaggtgcagtggctgtaatcctagtacttcgggaggccgaggcagggggatcatctgaggttaggagttcaagaccagcctggccaacatggcgaaatcctgcctctactaaaaatacaaaaattagccaagtgtgatggtgcatgcctgtagtcccagctactcaggaggctgaggcaggagaattgcttgaacccaggaggtggaggttgcagtgagccaagatggcgccactgcattccagcctgggcaacagagcgagactctgttaagcaaacaagcaaataaacaaaaaaaacaaagacttactttgtcacccaggctggtctcagactcctgacctcaagtgatcctcccatctgggcctcccaaagtgctgaaactacaggcatgagccaacgtgcctggcccaagtaatttattttcaggaaaaggcattcaggaaatgtgctcaggggagctgctgtttgtttaattgactttgtgtaagcagaagccatggcgggatctaaaaatccctgggccgacgtccttgtctgcaccccgcatccagaggccccgtggaggttccaacgattcgctcccaagatcccggcagctggcagccaatgcattctgtctttgacctttgcctgctgctgttagagcatcattcagtgagagtgaatttatttttctactgaatgtattccattccgtggctgtaggcattaatgtagctgggattaaaatcaggtcaacaggattgaaagtaaatagcactttaacctgaagaatacatatgggccactaagaggcagcccttcagatctcaagagggtgatctcaagcaactggcactgcaggaagtggcccagggacaagtgaggagggcagcctggggcaagggagggtttgctgctgctcttcacggggaaaggaacccaacagtaataataatcacagcagagtagtagaggtcacagtcgctgtcattctgagagcttgcccggtagcagccatgccctaaaacaattacatgcattattttaatgaatccttatagtattttattgttttaacgaaggcccctgaggcagataattatctttttaatgttgccaacgttgattgaatattaagcatcattgatccgcctactctgtgccccacagaataccgggcaggttttctttctgcattcacttatacagtcttcggaatcatatcatgttattgtcgaagaggcattctttccattttgcagataaagaaactgagactcagagaggtgaggtgacatgccccaaatttcacagcaggacggtggcagggaaggggtcccaaccctgcctgacacgaaacactgctgttccttctgggaggtcctttgccacaccccagcaggtcctacctcccatgaccggagcttaggcccctgtgagccattccatcctgggatggctctccctgaggctgtggctcttgctgctgcccctctgagtcccagtccaggctctgtggcatcctgcactgtgctgcttccctaaataccctcccagtcccttctttttttttttttttttttttttttgagacagggtctcactctgtctcccaggctggagtgcagtggtatgattatggctcactgttgcttcgacctcccaggctcaagcgatcgatccttccacctcagcctcccgagtagctgggactataggcacacaccaccacacttggctaatttttgtattttttttatagagacggggtttcaccatgttgccaagcctggtctcgaactcctgagctcaagcgatgctcctgcctctgcctcctaaagtgctgggattacagccactgcccggcccgcccagtcccttcttcatgcatctttttactcctctttggaggcaggagcacaagtcttggccatgctgggttcgcccctgcctcctcccctgtggctcttgcatcaggcttctccatccccttgcaactggaagctccctggagcttctgtgacagctatgcagctttgaggaacctgttctgttccttagcgtttttgtcaagctctgcccggcagcctcctcctccaccacttccctgtcttcctcacataggccctgtcagtagcttcgttatttagtgaacaaaatacataatttggaggtaacttcgttatgcctaattgtgccacatagatgccaagtggatttttcaatgatgattgtgtatgagactcctcgtggaaatattgtcaaggcaatgactttgaaaatgagcctgtgtccctgacgctgcttcccccattaatgtcaccccttgacaagaaggagaggggcaaggcagcgagatctgatttggtgacagcgcactccttgggaagtgaacgcctacagctgttgcccaaattagcagctcctccttgggagcacgacttggcagccctggcctcagtgcagccgggagagagaggatctgggcttctcacgctgggccgcctgacatgggctggacaccataatagcagctgcaggccccctgcctctgttatcataatccctgggagtcagtgatggtgaataacactctgttataatgggaaaaaagagagtctgcttgcctgactccaacagtccagcaggagacacgcccacagtgagagaaggggtgtgggggcccggggaagggctggggaccccactgcaggcagctgtaaggcttttattaaactgaccttcacacagtggctaagaaaaaaaaaaacacaacgaacgcaggtggaatgctaatgccgggcaaggctaaagcagcctccagggtctccaggtgctcagagaagcttctgagtgtggccccggacaggcacagagcacagtgagaagcggtgggggggaggacgcggggagggcggtggggtagtcctaccccaggagggggcatgctcacttctcttggttttatgacagtctattctcatgtttgagaggtggagtaaagtggtggggacaaaggacagcaaacttgggtccaggaagcgtggatttgtccttgcctctgggatgggctctgtgatcttggtccagagagacagagcatggaagggcctagggaacagcctgtgcaaaggcagggggctgtgagagaacaagatggcaagatgggatttgaggtgggacaaacttgtattccaaatatccatagccgccagtcgtcctctgaatgcctaagccaggtgacataaggatccctggtgttttcatagacgagcttcaaggcttgctaagaagtgggcatccctacatactagagtccttccacgccgcatcctacctcaccctcatacctcttccaggcagataattttatctacctagtggagaatctcaggccctgatctcaagccctggaaaagttgttgccagcattttctgctgtatttggtttttcaagacgaatccattgctaggcactcactgagctggtagtatgtgctcaacacccatctggccattggaccagtgcccaggctactggacaaatgtgttggtgctgaaggcctagaccccaggaagagggctctgcccctggaaagctgcggttccagggggaacctgaccagggaggctgactttgcctgtggcagggtgagggcagtgctaccatgactgccatcaccatctccaccatcactaccaccatcattaccaccagcactatcaccatcatcaccactaacatcaccacctccaccgtcattactaccaggactattaccatcatgccatcaccatcattaccaccaacaccaccatcattactaccatcatcattatcaccatcatcaccaccaccatcaccaaccacctctaccatcattcctaccagcactattactatcatcatcaccatcaccatcattactaccaacatcaccatcaccaccatcattactgcaatcatcaccatcattaccaccactgccatcctactgctatcatcatcaccatcaccataaccatcattaacatcatcaccaccaccaccatcactaccgtcatacatcatcatcatcatcaccatcaccactaccatcaccatcataaccatcaccgtcaccataaccatcaccatcaacactgccaccaccactaccaccattactaccctcatcaccaccttcaccgtcaccaccaccaccaccaccattactaccatcatcaccaccatcaccatcatcaccatcattactaccattaccatgatcattatcatcattaccaccactaccttcactgccatcattactaccatcaccatcaatactatcaccaccaccaccatcattactatcaccactatcaccaccgtcattgctaccaacaccatcactgtcaccataactgtgcatcaccattatcatcaccatcaccaccattgtggtgtatcaccattaccatcaccgtcaccataaccatgcctcaccatcatcatcaccatcaccaccattgtggtgtatcaccattaccatcaccgtcaccataaccatgcctcaccatcatcatcaccatcaccaccattgtggtgtatcaccattaccatcaccgtcaccataaccatgcctcaccatcatcatcaccatcaccaccattgtggtgtatcaccattaccatcaccgtcaccataaccatgcctcaccatcatcatcaccatcaccaccattgtggtgtatcaccattaccatcaccgtcaccataaccatgcctcaccatcatcatcaccatcaccaccattgtggtgtatcaccattaccatcaccgtcaccataaccatgcctcaccatcatcatcaccatcaccaccattgtggtgtatcaccattaccatcaccgtcaccataaccatgcctcaccatcatcatcaccatcaccaccattgtggtgtatcaccattaccatcaccgtcaccataaccatgcctcaccatcatcatcaccatcaccaccattgtggtgtatcaccattaccatcaccgtcaccataaccatgcctcaccatcatcatcaccatcaccaccattgttactaccatcatcattgtcaccatcaccaccaccaccaccacatcatcatcatcattattgtcatcatctgtacaatttgtgaagccatatgcacaggctggggattagaatccaggtccagcccaggtcttgttggcagtaggtacccaacccaccctggatagtctgaagtgaactgaatccactctcaggcagctttctttccaagtggggaggttctgagttgtctttggacagggaaatgcacctgtcttttcggtgacatcttgctcttgtttctctcaatgtgatagaaagcaatgtgactgacattttctctctgggctggatccagagttcttgcaaatatgacttgtcagcaaggctgctatgggggtggcagtgggcagctgtgggcttcgggggcttcaatggggtgtactcctgaaggaggcctgtttctgggcagtctcctccttccttggggcaatgctcatgggtcaggatgaggtaaagggtcttgagggtggcactgtctccctttgagaatgatttttgttcatttccctccacaaaacagaatgcaagtcagggagcaagctaacattggcttgagcacttggcaggtgctaggagctgttgtgaggacctcatgtcacatgaagtccaaagctatgggtgttatctccatgtcacagaagagaaaacttcagttcccagagcccagtagtaaccttgcctgacatcacagagtgcacggatgacagagcctgtgttcaaaaagcattcataacgggggcacttgagctcttgcatgtggctcaaggagctagcctaccggggttcaggacctggctctgccacatcccagctgggagcttcataaccctttgtgtctccaggatctcatctgtggagtgtaggtaaggctggcccctgcctcatagagttgctgtcaggcccaaatgagtggattcatgtccagcgctgagcactgtggccagcccatcacaagggttcttagcgttagctatgatttgtattgttagagagctgagtgggtccaggcagttggggctttgccagctgtgctaccagcagtgagaggccacggaggtgagctgataggactggtattttgaaaacatggccctggctgcagcatggaggatggaggaaggagaggtggctggattgctgtcagcagagctggagggcagtgcagggtgtgtggggagttcaggagggcgcaaggtttgggggtcacttaggcatgcatgtgggtggggaaggggtgtgtggcgaggaggacccctaggattttgtttggggcaccaggagggttggggtgcaggctgagatggggagctgggacaagagcctggtctggggtgtccaccagagctgtcgagagttcagttttgtatgtgggggttgttgctttcaaatgtttttacaatccagaacaatttttcaagaaaggatcatcagacagcacgctgatgtgtaaaacagagacacgtggggtccctgccatcagtgtggaataagagacaccgcccgcctgcccgcccaacagctgctgacactcagggttggtgcagacaatgggcaccccggcgtgcaggctttgtgcctgtcgaacctggcacacctgcaatttatggtcactctttttgccagggctgcgctaatgataataaacaacacgtgtgtcattttgctgagcctccttgagagagcgagccaggcaccttctttgcaaagtgtcagataaactcacagccaccgccatctgtcttacttggcagggaccaagggtgtcattgccaggactgggctgtccctgccccctgtgaaaacaaaacagcacccagcaaaacgagcccgggaagacagtcagtatggggagtccttgccagctgcaacaagcgggatctctgtcccctgtttttatttgtcacagtgacatccgtcagcgcaggcacctcagttctgtgccagaggcaaatgcaggaggagtgccggggggtggggggtggtggcacaggctccccgcacatccctgccaccctcctcctccttggcaggccccgtcatctcgaaggtgaggaaggagaggctgggatccttccttcctccctctcttccctttcctcccttccgtccttcccttcctctctctctctcagtcctgcccctgccctcttttttaaacctgtgtggacagtagtggctccacctggccttgcggtgagtgcgtggtggctggagctgcagcagggtcgagttccctgctcccgggcagcctgcggggggatcctgctcccctggctcagcacaggaggcgtttccatcccataggtcagtcctcacggtggatgccccctttagcgtgcccctccccccctctctcccccaacactcctccaggcttcccctcctccctcccttcccttccctccagcctcaccccctcctccatcctcatcagccttgctagtttctgtctttgcactggcagttccatctgcctggaacctcctcctccagcctcccatgcagctgctccaaggtctcagctccttgtcaccacttctgggagaccttccatgtcccctgccccggcacctccatgatgtttgtcaccatcagatggcctgtgtgctcaccacatgtgtttcatgtctacccccccaacccccaacagcttcacagggccagggacctgcccacttcctcctcaagtgtgtccctggctcacagctaggtgcatggcaggttctcaggaagtccttgttgaatgaaggcattcctttgctcctttgttcatttattctgtcaggtgtactgagtgcctacgcctgagaggccaggtcggaaggacttaaattcagaggagcaatcttatcagatggatataggctagtgcagtgagcttcccaagccggctgccccagaggaagacaccaagcagtggtggatgttaaaatagcctctgggtctcctcggagtacaagatccccaaaggggagccccgtgatgtggccccagcaatgacattatcaccttggctgcattaacagaagtatagggtctgtggcaagggaggtggtagtctcgtacttggcaatgacttggccatccttggaacaccgttcaggtgaggtcacactacttcacaagcagcagcaacaaacttgagtgtgtccagagaatggtgacccggcaaattcacgtcaaacagagtggggaagcacaggccatttggaccctcacagcctgggcttgagtttctcctctgccatttgctagctgtgtgaccgtgggtaagtcatgtaatgtctctgagtctccagttcctcctctgtaaagtgggaatgtgagcctgtcggtgctgcagggtggttgtgggagcattaaacagatgacctcagtcaaggcggttcacacagcaacggcgcccgggatgcaagagctagagctatggttgccagggtgccggctcttctcgctcagggctgggctgttcaggctgagctctgcatcagtaggatttgcccccatggggaagcccctgccaggcctgacgcttgcatactcaggagcccgtgttggctccgactctccctaggaaattgcttattatgggtctgtgaaagcgtgcattgaattcacgcagtttatttttaaataaactcggggaagtgggcaaacaaaaagagacaacttaaaaggaatgttctccgagtgtaaagaagactttggcagaggcccaaaatctgaccccaaatcccagctcaggagcacaggcggagacagcccccagccctcctgccacccgggccagtccagtgctgtgtgtcagcctggggtttcagctctccctctgagtgcttgggcttcccatgcacctaagtcctcagcgctgggcttcatggagacttaggggattggagcactgtttaaataccataagctcctttttttacagaggacttaccaccctcactccacccacccctgttcacgtgtggtggtgaggcgggtggtggtgctgggttgatgaatgtgccggaatcctgttccaaaaccgggtggccatgaagagtggacacagatgaaggggaaccgccctggtgtgctctaaagtgagccagactctccagggaggctggagctggcatcagcaatccatagcagtgaattcctaggcagtgaaaaaagcaatgtggccaaaagcatgttaactaataaagccggagagaagggctgccaagtggcattggtgaaaacctctcaagcccaccctcccacgggcctggtcactgcccaggtgcacatcttccaccttgactgcccggacctgctgcctgccgggagtcctggccttcagggtcacgcctgccaatccactgggtccccccagcagccagcgcaccccatcaccatgctgggtgccaggagctgcaggcccagccacgcctctctttaggggctggtcctggtcacaaccccaggtgtaactcctagagaggcctgcccccatggaggggaccacctccctggttcatgggaggggccaagacatgttccctgagtggctcagtccctggaagcagttttaagtttgaagttggccaagaggatcatgaaaacgaatgcataagtgatgtggtttggctgtgtccccacccaaatctcatcttgaatgggaacttccacaattcccaggtgtcctgggagaaacccggtgggaggtgattgaattatgggggcaggtctttcctgcattgttctcttgatagtgagagtctcacgagatctgatggttttaaaaactggagtttcccttgcacgtgctcttctctgtgtgcatcatgtgagctttccgccatcatggtgaggcctccccagccatgtggaattgtgagtccattaaacctctttcttaggctggtgtggtggctcacacctataatctcagtactttgggaggtcaaggcgggtggatcacttgaggtcaggagttcaagaccagcctggctaacatggtgaaaccctgtctccactaaaaaatacaaaaaaaattagctggaagtggtggcgtgcacctgtaatcccagctagtcgggaagctgaggcaggagaattgcttgaacctgggaggtggaggttgcagtgatccaagatcacactgctgcactccagcctgagcaacagagccagactctgtctgaaaaccaaaccaaaccaaaacaccaaaaacctctttcttttatagattgctcagtctcgggtatgtctttatcagcagcatgaaaatggatgaatacaataagtaagtgcccactatgagctggtctctcctaagtacatatcaattccctgcagcagccccattgcatggatgaggaaactgaggcacagagccgtatttgctaagccacacaggctccagaggcttgacttgggggcgtgtctaccccggagaccctgtttggaatttctgagatagagagttcagtttggagtgctcagtctgggaagctgacacagcaggactcggggagtggcctggccccagctttgctgagtgctctcccagtgcattagtcctggaggtcctggccagcccctcgcacatgcctctggtcggctttgcaggttctccctccccgtggagcagatccacccgtggatttcgtcagcgcatcttcagcctccccaccatgggcacgtggcagggcagcctccctaccccgatgctcacacacatcagctctcacccacttccggagctttcgcacacagtgtcttctccagctccccctccccatgttcctgcccccttcccttctggaaggcaggaaataggagctgtgtgaccttgggtaggttattctccctctctgagcctcagtttcctcctcgataaaatagagataagaagaagcagccacgtgagtgctgggatcatgtaggaatggcctcagtgcccccccagcttagctgtttgcggctctgctcctgggtggggtgtgtgcaggggacccaggagaggcccttttttttgctcaatccctgggctcttcctgggggagactgtgcccagagagggcataaccaccaggctgggcaaggcgcttgggctccctgacctccagcccaggctctgctcacagcaccaaaagggctgagagctgctcaggactttccttctgtttggttgtctgagcccggacgggggcagaggcagaggagatctgggcccctgggctacctgctctgagcgtgcggctcggctctgcagagaagcaggaacaggaggagaagtttgtattcagaggacagcctggtccatctgggatcgtcatcattatagttcttcataattagttgcagcaaagctgagtagagaattaacaactcaactaagactttatttaaaaataaggtccttggcagcttggctgactaatattttattgaaaaattacacatcaacacgctcaatgatcttccaaagagaaataacgttgcccatcatccttgtggggctcttcccctggcgcggcccctgcctgccggtggcggggtgctatcccgagctggtgtccccacgaggctccacagccctgacaatgccctcctgtgccttgatcctgtgtgacatttctctgggtggagggactgggccccctttactggtcctctctggctggtccctgcctttgcacacaggggcctgtggcttccatgcttaccggcttttgctttgctctcttatccccagctgcctgcctagcacgtcccctcaatcccctaggcagctgctgctgattcttgaagacttgcctgtggggtccccctgtctaggagcctgccctggaccccagtctaatgtgggtccctgctgggccccacagcacggggtacgatcttgcctttctccccggctctcagggcccctggatggcagagctgaggtctcttcagtgccacatcgggagcaggtctctgtagagtgaagggagcacttcacatggagagttggggcacaggatgtttgtccagaggtggaaacgtgggtgcaggtgtccccctcaacctgctgcattcctgcgaaggtctatggggatcgtgcccacgtgtgtacccgctgcaggtctgagagcatcgggcccgtcccgcagctgcctgcgccctgtgtggtggtggatcggcctctgcttctaacctggagcacatctgaagtgacgctgccgggcccttcttgagaaccttgccgcactcccctggtttccatggcgatgtccgtttcccattctgaatgctcttcagagggattataaattcattatttcatacttaggcctcacgctccgccttgctctgcttccacatttcgttgtgttggtaggacattcttcatatattatctgatacagaaaaaaatgagtgagtcagagcctaggttgtttctttttcccggagcccaaggattgctgtgtccacagaggagccagcacactgtgacatgccggcatcgtgatctggaattccctgtggtacacgtgggttctggagctgtaggttttaattacttgtggatgaactgagctgccgcatagccacctacacactgaccccgggagccacgtggaggcgggtgtgtgtcgggagctgagctttggtgtcagctcgctgtgggtccctcagtagctgcacgcccaggcctctgacggaggcgctgtgttggatttcacttcgagccttggtttccaccagctgtgatggccacagctgagataaagaggacgcctgcatgctggtggcctctagaagggctgtgttggctctggcaggaagctcgtggggccggtgggggagtgagggaagatgcctatcctggcagctgggcagagtggagaggaaaggacgagagcagtatgggcgacttgtgtggacagggtgaacaagtgggtcttgggatattcagtctagaaacaggcaggacatgggttcctttcattgcggcccttgctgatatgggtcagttggctttggatctgggcaccccagaagccagaaggtgtgtggatgatgcgtgtgaatctggtgtttataagttgggtgtttgtaagtcagtggttgaatgcagtaataatgattaagttttctttaaagttaggtttatggaggtataaattacatgtagtaaaattcactttttttttgtttgtttgtttgagacagagtttcactcttgttgcccaggctggagggcagtggcgggatctcagctcactgcaacctccgtcccctgggtttaagggattctcctgcctcagcctcccaagtagctgggattacaggcacctgctaccacgcctggctaattttttgtattttcagtagagacggggtttcaccatgttggccaggctgatcttgaactcctgacctcgggtgatccatccacctgggcctcccaaagtgctggaattacaggcgtgagccactgcgcccagcctgaaattcactttttaaagcatatttctcagtaagtttcgataaatgcatacactcatggacgcaacaccacagttgagataaagaacatttccctcaccccccagaagttcccctgtgccctttgtggtcaacgcccccacccccaagccctggaccccctgagtctgttttccgcctgtccggagtgccgtatacatggaatcacacagcatctgtgaccttccgggcctggctgctttcactcccgcagtcctgttgtgatttgttggtgctggcatgtctgttcgtgacgtcaggagttcgtgcctctttggtgcaacgcagtcttccatcgtgtgaatgaggcacagtttgctgctgatccgtcgccagctgcaggacatcttggtggtttctgttttttttttttttttcccctatcatgcataaagtgctctgaatgtttgtgtgcaggtcttggtgtggatgtatgcttcattgctcttaaatacgtagccgtgacatggctggatatgataaatatatgtttaactttataagagactgccaagttgtttccgaagaagctgtgtccttttgcattcccaacaccaaggtatgagagttctggttgctccacgtcctcttcagcacttttttcaacttctaaattttagtcattctaataagtgtgtagtgacattgcattgtgatttaatttgcatttccctaataagaaatgatactgagcatcttttcatatgcttatttgccacccatctgttttctttggtaaagcaaatattcaaatttgggggtcattttatagtacgttgtttgtctttgttgtattgaattgtgagaaacttttatatatatatatatatatattttttttttttttttttttttttttttgagtcggggtctcgctctgtcaccctggaatgccggaatgcagtgtcatgatctctgtttactgcaacctccacctcccaggttcaagtgattctcctgcctcagcctcccaagtagctgggattacaggccacactaccatgtccaattaatttttgtatttttagtagagatggggtttcaccatgttggccaggctggtctcgaactcctgacctcaagtgatccacccgcctcggcctcccaaagtgctgggattacaggtgtaagccaccacacctggcccctttatatattctgactgcaaatccattgctggatgtgtactttgcaaaaatttcctcccagtctgtggcttttccatttcttagcatccttagaacttaagttttaaatgttgatgaattccgtttatctatagattaatattttttatgattcctgcttttatgccttatctaagattctttgactaatccaaaggcacaaagatttcttcccccttgttttcttctagaagttttacagtttcagagtctacatttaggtctaggatcccttttaagttgatttttgtctgtggtgcaaggttaggattgagattctttctttctttctttccctctttctttctttctttctttctttctttctttctttctttctttctttctttctttctttctttcttttttgcagagagacgttcaattgatcagcaccatttgtgggaaccactataatgactaaggtattggaaagagagatgtgggataatttcttgggagagggactgagttggcccagcaaggcttgtggggaaatgctcctcccccatgtgagagagggagaagggcagtgcaaagctgagctcgtaccagcccgggtctgaaagtggcgtgctcacatcatgagcaaggtggatttctcccgttgcaatgaaaatcgggtgccacgctggcagcattggcagcagccctgggacgttccccagacattgtctgcgtgttgcttttccgggtgcagtggcttggcctgcccacttctactcgattcacaccatctagccaaactcacctttgtctgtgccacgtccaggccttgcccccatccttcccgaagccaaggttgctttctcagtaacgaccaagagctggggtccccgatcgctgaacagcccacacatttgcaggaactagtcagaggtggcttgtacagtgtctcggtcacctccctggcaggctcaggcttagagtcccacagcgtcacctggccccacagccatcttgtgctccctccagcctctctgcctgggtagaccgcgggtggggggaggcttttttgctgcaggtgaccctgtgctgggtgtgtggtctgcatgggcttgcgggcaaggcctggagctgggctggagctcacctttacagtggacactttgctgttggggttgggattttgtttcaggcaaattgacatttgtatcctcagagggcaatgtctgagcaaatccactgatcactggggtccctggcatagtgacgagggtgtggaatgtgcagggtaagtcatggtgattcgatgagaaagggacttggaggctgccttgtctaactctggcttctgggactctcccctgcatcaccctctctgggtcatccccatgaagtggagctccctactctgatcagagggaaagtccgcctctgacagaacctctgtgtcctttcctagtcccttgagtcaggcatggggatacagaatcattgaataagggtgttggacatttatatcagtgtctcattcagatgataaatggaaattctagaatcatcaaggcagctccatgcgcctctgtctctgggcatggaaactctcatgctacatcccgtgttgggtgagagatctcagttccctgggccttgcagcgttgcggggccatcagcaggataccgcggtgggatttctgaagcaagatctggtatggctgggcccagccagtgagaagccttttctcacgcatgtccagtcatgggagcgatgcccgtgtgcatggatgagatgccagattgcacttcctcgattgcatggaggaacatctgagttcaggcttggctgcccagaaccagcctgagccagctttgtgtcactggtaatagcagctgaaagcagttaaaaaagagaaaccaaaacaaaaatgcatgtgcaatactgcaatacacatccaccccaaagcctattagaagtgactgtgaggattattggctgccggcactgtgtgtccacagaggagtggacaaggacaaatgtctggggtttgtgtcgagtgcaagtggcttcttcctgtgtctcattcaagtcactttccctaccatcggccgcttgttattcgtgcgcaggttacttgcctctctgggcctcagtggcaaatgaggatagtaatacctaatcagaggttgttatggagattaaatgaggtgaatgcttatagcttagaaagttctaggtaaatgcttgtgatacaaacacataagctaggtgactgtgagaatccaatgcaggcaggtctggaagcagtccttggcacatggtaggagtgcagttggtgacaattgacctctgcatctccattcacgctgaagcctgcctgggcaggactctgcttctgtgtgccatgggagcaaacaggatctcttttgtagtacaatttttccctggttgtaaatataaagcatgcttattatagaaaagctggaaaatatgcaaagagtaaaaaaaaaaaaaaaatactggctgggcacggtggctcatgcctgtaatcccagcactttgggaagccaaggctggtggatcatttgaggtcaggactttgagagcagcctggccaacagggtgaaaccccgtctttacgaaaaatacaaaaattagccgggtgtggtggtgggcgcctataatcccagctactccggaggctgaggcaggagaatcgcttgaacccaggaggtggaggttgcaatgagccaagattgcgccactttactccagcctgggtgacaaagcaagactctgtctcaaaacaaaaataaaaacaaacaaaaccaattcactaatacccagaggtcattattttctcactcaggcatatttttttctggttcattttctgcgcatgtctatgtgtccatacatatgcatgtctttgtgggtttatacataggtatgcctgaataaactttttacgacttacaaagaagggatcgtgaccaacactccaattgagttaaacaggtatttgctgctcatatagtgtctagaatttcccaaaacagcaggcatttctaatctcaagcctccccagatgtcctctggaaggggcagggtcattcctgacccccacccccacccagcccacggatgttccagccccagtgcacaaaccctggcctgcagtcacgtgcagcctgaagaccggctctgcactgggattcgggctgtgaaagtggtttgtgcctgcaaagagtttatagtctcatggaggaaagaggcatataagcatgtgttttctgtatgcgtgtggaagtatagggaggacatgttgtgtctgtaatttcaaatatttgttcatgtcacattgtaccatgggtattttctcataacattgtttgtctttttttttcctccggatttgtatcgttgattgaatgaaatggttatgctatggtttatggaaccattccccagtaggggttgtttctggcttgttataaagaaatgctgctgacgagcacctagatacagcttcgaatgttgacaagcagatgtgtttgcccagttccagaactggggctgtgacgggggggacagatcggaccttctgccaagggtctgattccggtggaagggaacaccgcatgaagccacatgccacgttcccagcaggcgctcaacagacattcatcacttcagcttcccctctgaaagccgagaccacatcctgatgcatgtttaaatagttctgccaaatttgttccatcattaactttcaatcactgttaattttagacagggctcttaattcaagttttttgtctttgtcaagttgatggagatggctctgtttttagccctgatgtgatggcggcagggctctccttcacccaggatggcagaatgccctccgccacagctggtaatgaaatgccaggcgtgtgatttagctcaatcagctcaggaagtttacatggggagcctgatttgacaggtctgttttataacaagtcgggccagtgaagggagccttctatttgatatacttaaggcagaattcagccatatgtttgggtcccagcagaatcgttcccgtcctcgtccttccgtggaagatacattgagttcaccctggggagatcttttaaattagatttcagaaatgaagatcttgttttttgtgtccagaaacttaacccttccatgattttcttctctccaaataagtcacaatataccccgattttcatgaagaaggatatatggtttttttcttctgcttttagttataattagactagctgaactacatggagaagctaaagctgcatttatttgttacaggcatatttatatcaaatacagatggggtgggtaggcttgtgactcttcatggccatgaaaatgaaatgaatttggtgtctgaaagtaacctcgggtgagactaacatctctgttgaaattgactccattgcttctcttcaggctaatgtgtatcatcggaggggtccattcagataatttaaggcacctttttggggctctgtattagtctgttctcacactgctatgaagaaatacccgagactgggtaatttataaagaaaagagggatgatacagttccacatggctggggaggcctcaggaaacttataatcatggtggaagaggaagcaaacacgtccttcttcacatggcatcaggagagagaagtgccaagcgaagggggaagccctttataaaaccctcagatctcatgggaactcactcactatcacctatcacgagaatggcatgggggaatccacccccgtgattcaattatctccacctggtcccgcccttgacacgtggagattattgcaattcaaggtgagatttaggtggggacacagagcccaaccatagcaggttcctcccccccacactgctaccagaacacctgtgtgccaggctttgcatgtgtcatccctgaggcattgctccccatctccaccctgcccacctccctcagaccaccgtgggcagctgagagttatcccaagtctgcccgcatcaggtccaggcccattctgtgaccctgaatgagaggaaagaccacatttcctcttcttgccctattggccaccatggacacggatgcattcttggcctttttaattgaccctggctgagtgggatggacagcaaaagacagcctctccctagatgcaccttcattctcgggtaatatgcataccccggcctttgttttatgcgtgtgatttacacgctgatcacgcacatctaaagcagatgtcctgggttattgtgagattctgttgcctcctagatcctgtgcttgggatgtggctaaggatgccaggttggagggaggcacatccgagtatgggccagctctccgtgtgggcctgcctttaaaaggaggatcctttcagaaatcgcacctgtgctgcagttgactccccagggtgcagcaggttcagcaagagttggggcatcctgagccttgggagggcaggagggagggcaggatcaccactgggcatctgcagggctgccttggggagcaaacacagcctgcgaggttgcaccaggcagagctggggtggatgggtggaagcacgagaggcgtattcagataagcgtgaggagggccttcgggagtgggggcgccccatcgtgtgagttgtgcacatggaaaggctgttggctgggctgctgcaattacagtgatgtatggctgaggctttcccgttcacaaatgagtttcttgtgttatcagttcccccactaaacacccttcacaatagacacgcggatactatgggtgtccattttgcagatggtatgattgcagagggatgggtaacctgcccaaagccacatagcccaaatgaaggagaaccttccagaccctgtggctttttagattcgttctctaagcagaggcaagggactcactgggaaatatgttgctttgtttgtcagatttattccaagacctctatgaagggcctgtattccttcaggctgtggcatgcctagaaaacacgctgaaggcagctgcagaaacttgctttttagacatcaccaaatgctatttttaaaatacttttcttaaaatacttcagctcagacattcagtgcgtgagtgtgatgatttgtctcctcctggtccctggctccccatccccagtctgccggttccgttctgctttcctgatgcccagagcctggctgaggacaggcttggaagagccacgggtcaccaaaggttgctcaacaatggccatttcttcaaaatgggctgggttatggttgctcatgcctcagaaagcccggagatgggtagacagaagccatggggtgctgctgtcagagacgtgctcagccccagcctggggtttgggggcttacctggagcctccacaggagcctggttctgagatctctgctgtctgagcatagggagcttgtctgggggccccaagaggtgtctggctttaaacaagtaacattcacaggggacaggcttttgtggtttcatagagaagctgaaggtgctgagtcctgccaacagtctcacagctgtttcctgccatgttggaattgcactggacaggtagcgagctccccgtcaccggactcctgggctattactggggactggtgaggaagctggtgttggagattctgaattcaaattcaagagaaactgagtgttttccaaagtgaggtagttctgttgctgaggaggggctggagtagagcatctgatggctttaaagcccagggcaaggacgtcaatgtggtttccgtcatcctctgctgacccgtggctagactgcctgtggcagccccctcgttcctccttaataaagtcagggcggggcgtaggcctcaagcttgtcttctgcaagctattgctgtttatttttgtagttaccttctatggatgacaagtaatgtttgttttctatttatggccgtgatgtgaaatttgcttacttgtgttaaagaagtgggttaattaggtgcggtggctcacgcctgtaatcccaacactttgggaggccaaggcgggcagatcacgatgttgagatcaaggccagcctggccaacacggtgaaaccccgtctctactaaaaatacaaaaattagctgggtgtggtggcaggtgcctgtagtcccagctactcgggaggctgaggcaggagaatcgcttgaacccgggaggcagaggtttcagtgagctgagattgcgccactgcactccagcctgggtgatagagcaagactctgtctccaaaaaaaaaaaaaaaaggagtgggttaattaacaatgacagcttcatgatgtatcctcctggtgggtgattctggtgcagatgtttgaagatagtccctgaatgatcagatattgggtttcttgagctgtttggtcgatgacatgacagtgactcctggctctctttggaggggatggccgctttgactcgcaggtccagctgagagagcattccagcacagggctgccagtgagacacacggagcacagagctggagggcggagcacagagctggagggtgcttccccagaagaagagcacactgtgtccaaagccacgcagtgttagaggccagccttccccgaagctgacatcagaggctgccctgtgggggctgcccctgaaagggtccctccctgcaggaagcccagtttcccaaaggctcttcctcctcctccctggtgaaggctgtcccccgtgagtgtggtgtccctggcggagggagggtggctgtgcaggtgtggatggataagaggaacccctcaggcagccaactctcttactcacagaatgatgtaaaccttctctttgaaacaatttcccagaagagcaggctcttctaatcccaagcctccccagatgtcctctggaagggacagggtcattcctgactcccgcccccacccagcccactgacattccagccccagtgcacaaaccctggactgcagccatgtgcagcctgaaggccaccatgtgccaggagccagggccagagagccttaggctccaggatgggcagtacagtggggcaggccacagccttcaaccagcagagcaggcagacagcagaatgaccaggcaccaagctctccattccactagcctctctgggccaggcctgtggagtctccagaggaaacaggcaggtgaacaggaccagggacacaaggaaggaagggagtcgggtcaaagatgggacctcgttcgggaaaggcccaggcatgaggggctccaaggcctccagaaggaccttgaagggtgggtggtgctgctggtggagcggggaggcattttgggttgggtgtggggtgagccagccctcagagcagggcaaagctgatggtgcctggagctgagcggggagcaatgggggtcttggtctccaaaggtcttgaccacagggatggggtttgaactttagcatctgggcagtgggagaccctgatcatgtttgagcctgggagtgacattgccatcatcctcactggtatttatataacatccctggttgtacagtgagttcccaagtgacatctccggctgccccagggttaatgcccctgtaaggtgcagagaacaggcccctcctgagacagccccagggctgcaccagatccccgagttgagtttgaagctgattgccagtcctccctgccagggagccgggaaggccttattgactccatagattgggtcccagactggactgcaaatcctgaaagggggtagaaaatgatgctgacatgcctgtatgtttagtactttcccgaaattcttaacagggtccacagctggagaaaatgacaaaactcctgccctgggtaaggggaggggcatcatgatccttttcaatttgagaatcagcgtacgggggctggaggggatggtctgcaggtctggggggcagggctggggctgtccagtggcccagggagagaagaaggggccagaactggggacggtgggtgtaaacagctgcggggcccacgcctcctgctggcacagggctccgtgccagggtccgcacaacatcaacggacccacacacatgctttaatttcctttaagatcagaagaagaaaaaatgaacttttaggtggagaaaatgttttgatctataatatgaagatatgctattttttaaataccaacacagccataaaatacaccttctgatattttttaatggaggaaaaggccatgaagactccagcgcttcgatcccacggagtcctcatgccccgcggggctgctgaggggcggatttcaaaacagggcctcgtgtcatggatgcttctcccagcagctttcttgagaagataatttggtacggagctcaagagggctctgtgtggcttcttcccaagttggcatcagaacctccaacctctaccttcctgacaattctgaggggtaggcctttagaggtccacagcctgcttgggttccctaaggccaagggacattgttcagaggctgctgtgcccaaatctgggtctttgcagttggatgcagacagtgacttcttccacccgcccctcctccccctgcaagaggcagcgcttcctttgtgcctggcacctctgttcagacatgacagcgttgtttctaaagagaaattcttggaggtaatgaacatatggttgtctggctgggcaccagcagggagggggagagcattggagcctggggagggatttctgctttaaaaacaggatcagcaatttccacccacctcccggagatacccgggcactttttatgtcgaaagacgctcagcactaacaacatcacagcttatccgattaccttttattgccataaatagacctgagcaatgccaacccttccaggtagaagcacattttgaatagcaacgacaaaaaacaaaacaaaaaaaccaaaacagcagcttgtaatttcattaataattttacttacagtgactattaaaaaggagtgacgggtgaaattaaaattcaatcaggttatgagaaatggagagtaaataatattttcaaaggacagctgaggtggaaaagtctaccaagacccacctattaaaatatacattatcccttaaacagatttaatgtaaaaatgcaattttccacagatcagcagcacccgtccatttatttgctgctgactgattttgatttatgaggccctttcttagcttcgttcttagctctctttatttcagacactgggtttcgtgcctgtgaaggtgtccaatgcctgtgcatgaagggccttcttcctcccacagtccctgcagaggcccttggtggaggcccaagggctgcatggtggagtctgaggccaaagctgccatccagccctccttgcgtgagtggcaagacttggggcaggtaatgcctctcggtgcctcaacttcccccaaatggggacaacatggttcccagggacaaggcctgtggggggactgaaagagataacgtccatagagtgctcagcatgcggctcaggacagaggaagtcatttattttaatgagacggtgacgagaagtggcaggttttctggtccaggcatcttgggtgaggcatcctgcctgcccacagtgcacctccactgcaggtcagacctcgggggactggggctggctgtgggaaggagacggggttaaggtgcgtacacggggccctgcaaatgtctctgcctcaaccgcgctgggtaacaggtgtcagtgaggtggcttaaggcaaaccacccgtgtccacaccacagggctggaggacatctctcaacccagctgaacgtccggctccacccaagacccttcttgggagacagtgtgttctgggttcccacctccttcctggctgaccctcacactgtgccggttgctccctctggacacactgcacggccaactccctgcatcctcgcttcagctctgtgaggctcagtggcttgcccaggactgcacagcaggcacgggcacgtagaagggccaggactcagaggagagccctttgcggagatgcctgagggcagggggcgcggacactgcattcgaggaggaatcaggcaggtggaggtccaggctcgccggctcagcttcagcagaagattcttagagggaaaggcctgtactcactgcagctctgatggctccactttggagggagagccttcagggatgctctgcgggcatttgtggatcccaagcttggagaatccaggagggctctgtggagcaggggccagggtgggtggcactcaggggtgtatgggtaggactgagccaaagccctagggtctgcagggtgggcagcggcattggcagcagtgttgagtgaggccgcatcccttggagagccagcacctcctgtggctttttgagcctaatgtgatacccacccctcccctcaggggtctttagtagaaagaaacgatattcctctccctggtaaataaatgcaggatcagtgtctttgaaatggaattgatttcttcatagaggatgagggtgcaatggggatgcccagcactgagccagctggcttcctcagggaccacaggatgggccagcccagccagcactgttgaagggaaggggccagcaggaagtcctctctttcatgcgggctggagagagcttccgagcctgttgtcctagctccctgggggctggtcttggcctcaggctgatgtggtttgagtccatcacagctggggcttgaagagtgccactctgcactcgggaggaaggcctgtgctcttccatggggtctgacgccctgccccacattgggaagcaaagctgggcctgggtgagggtgaccctcctgagaggtgggcagcttgagccaccaccgttcccatgtggtgagggacagacgccagctccaggctcctgcctcgggggtataacactgatccaacctttgttcagtaccacctgaaggggcagggcactgccaagccagccttggccacctgcctcgattgggaccagatgtctgaagtggcccttgctgggggagaaaggaaatgcacacttattgagcactgaccgaatgcttccaccagcatctagtcttcccctttgctgtgtgtaccagccccactggcatgaaaatgagcatcttcctcatgttttggaggccagaaaggagggaggctgtggccagactggggtacatccactttgccaagtggagcagccacactttggagtggctctgttgcctgcgcatacacatacacatatgcacacatgcacacacacatggacatacacatatgtacacacgcacacatgcacacacatacaggtacacagagatacacatgcgcacgcacacacatgcacacacatacacatttgcacacacgcacacacatgcccaccatacacatgcacacgtgcacacacatacaggtacacagagatacacacgcacatgcacacacatgcacacacatacacatttgcacacacgcacacatatgcccaccatacacatgaacacatgcacacacagatacacagaaatacatgcacacacacatggacatacacatatgtacacacgcacacatgcacacacatacaggtacacagagatacacatgtgcacgcacacacatgcacacacatacacatttgcacacacgcacacacatgcccaccatacacatgcacacatgcacacacatacaggtacacagagatacacacgcacatgcacacacatgcacacacatacacatttgcacacacgcacacatatgcccaccatacacatgaacacatgcacacacagatacacagaaatacatgcacacacacataggtacatgcatgcacacatgcacacacagatacagagatacacatgcacatacatacacatatgcacacacatacaggtacacagagatacacacatatgcacacatgcacacacacatgcccaccatacacatgcacacatgcacacacagatacacagaaatacacacatgcacacacacataggtacatgcatgcacacatgcacacacagatacagagatacacatgcacatacatacacatatgcacacacatacaggtacacagagatacacacatatgcacacatgcacacacacatgcacacacatgcccaccatacacatgcacacatgcacacacagatacacagaaatacacacatgcacacacacataggtacatgcatgcacacatgcacacacagatacagagatacacatgcacatacatacacatatgcacacacatacaggtacacagagatacacacatatgcacacatgcacacacacatgcccaccatacacatgcacacatgcacacacagatacacagaaatacacacatgcacacacacataggtacatgcatgcacacatgcacacacagatacagagatacacatgcacatacatacacatatgcacacacatacaggtacacagagatacacacatatgcacacatgcacacacacatgcacacacatgcccaccatacacatgcacacatgcacacacagatacacagaaatacacacatgcacacacacataggtacatgcatgcacacatgcacacacagatacagagatacacatgcacatacatacacatgcacacaaatacaggtacacagagatacatatgcacacatgcacacacatgcacatacacatatgtacacacgcacacatgcacacacatacaggtacacagagaaacgcacatgcacacacatacacatttgcacacacgcacacacatgcccaccatacacatgcacacatgcacacacatacaggtacacagagatacacacgcacatgcacacacatgcacacacatacacatttgcacacatgcacacacagatacacagaaatacacacatgcacacacacataggtacatgcatgctcacatgcacacacagatacagagatacacatgcacatacatacacatgcacacacatacaggtacacagagatacacacagatgcacacacaggcacacagagatatacacacatgcacacacccacatgcacacaccgatacacatacacacatgcacacacacacagatacacagagatacacatgcacacatgcacacacatgcacatgcatacagatacacagatacgcacacatgcacacacacatgcacacacatacagttacacagagatacacacacacatgcacacacatgcatgcacagacacatgcacacacatgtgcacacagatgcacacatgcgcacagatgcccccacacctgaagctgggagacaggtagacggcctgcagaagtcggctccgtgttggcctggctcctgctcctaactagagcagctgcagtgactgggaggacaaacaaaaccccaatgacagactcagcctgaatcccctctggctgctcttggtagaatcttaaccagcagagagctggtcctgggtggttttggccagatgagaaaagccacctgtgttctgggacccgcccgatgggggaggggaaatggaggctttgaaaggaggagtcttctttattttatttgaaaaatgtttttgaaataggtaatacagccaaatggttccaaatgtcatgactactaaagggtctctagttgaaatctcccagtctccctcctgttatccctccccgcttccccacccacaggtgtccacctgatcacatttcctgtgtttccttccagcatttcaccatgtttcttcaagcagaggtgaatacagattgtttttaaattgagataaaattcatgtcacacgaaactcacctctttagccattttgaagtgcccttgacctctcccgcttgtgaacgtaagagtgggcacgggagatctccctgcatcggctccgacacatcctttttcgtccttcccatccacacaggtgcccggggctgccttgagtggtgagcacccccggcgatccccccaggccctgctggtggatgcgtgggttatttctggtctctggttgttgtggtgttgtggtgttgtggtgttgtggtgaaggactttaggcatccctcatttcccatgcacagcacttcgatggaatagcttccctgaaatgggatctccaggccaaaaggcacatgggctcgtgcttaacttggcggttctgcccgtgccccactgcgggtggatcattcctgcccccacgggcagtgcgtgtggaggtcttggaaagcggcttgttggtgaacaaattctgttcctgcccatcctgcctgcgctctttccctcagtccctggcagtggagcttgtctggctggaggtcttcgtccatgttggctggcgggtgaggtggtctccagaccagtgtaactctttaagaacagctccagttggtgagtgtggagttactgatgtggagtgaatttggccaaatcctgtgtgatcccgggacaggcgagggtctgagttgggcctgagtgacgtgacccgtaccagcgaggcatgtctgagactcaggccggccactgcccgtgggccccactgatgggacttcttacagattccagggtccatgtccacacctggacgagtacacagatggggcgggggtgaggaaagacctcaccaggagtgggtcttggcttttctgagtcagcctgctgctgatgaattcactcagcaatgatcattctgacactccctgtgtgccggccctggtgaggctcaggagatggaggtgtctgaggctgacgcagttcctcccctcctggggtgcacagggtggtcagggaaggcttctaggaggtggtggccttgagaatgagcaggagggaggcagtggagaagtgagaaaggggagagcatagcgatccaagtatgcaaatgcctgcggggtgggtgacagagtcaaggccggagctcatggccaagggggtgtgtttggagtgcagtccgcggtagtgagagtggagggaaccagactgctgagggatgggaggagccccggcttcctgatgaggctgaaggacagtgagcaggggtgcgggcctccctcctggggatgccttgccagggtagcccctcaaatgtgagcgacgaaatgaagcttctgcaggcctggggtggggctgcctgtgggtctgcatttccaggagctcccgggaagctgcatggccagtccccactgtgagggggaggcccacggctgtgcagcttagccagggagacctcagtgacactgcgggctttcaggggccttggacactgaccttaagttctccctttttcaatggggtattgattttggagttggcaatcaacactaagttcttgcagtcttttagtagtagtatttggtgctttatgtgtattgattgacaactgaattgggcctgagtctgtctgtctttttgatgattcttgagcctccgaaaggcagccatgtgtcaggctgcttcacaatcatttcccactggctgtgtggaagactcagtgtcctaagttggaggtgctcagaacgtttcttgcttcttgtcttaagaggggcacatttgaagaggcgatgccgagtgctcctgaagagcaaacctggtaaagacgaagcttgggggaactgggcgctcatgcagggccagggttcaggctggctcagaaaacctcagtgtgtgtctctccaaagggattattgcgcgtctctccgtaaggagcttgtacccggggccattgccgtgctgctgaatcaggccccactgcacaagagcagagggaagtggcccagggtctcagaggaggcaccgtgaacttcccttggatggtgaatggtgaacctgacccccggattatggaacagctgacctcgttcctggtggatgctggttacattggggaaaggatttggtggagcagtttatgaaaatggtcttttagaaactcccagggcatgttattaggtttggaattgaacagatttcatgatgtttgggggttctaaaggcatcgatcggctctagtttttggaagggagcaactcctccaattgacaggtggagaaaccgcgaactctgcgaactcagaaacgtgccagtgaccactcagggaggaggggctgagccttgggcgtctatgttctgatttctggtctaagtttgtgtggatggacacaaagacatggggagaccctcccgcagtctccaagttagcaccatttctcagatcaggaaaccgaggctcagtgagcctggccaccctgcatcacaccctctttgttttattttaatccatctgagaagtgcccactctgccagggccacctggtaaggacagcattgacctcccagttcatgctgttcacaggtgaagacgctgacgactttgctgctggcccatcagccctggagctgagacttcctctgagccagccccctttccccagagcagcagaaagtcctgttaatgccgttgtgggtccgaggctggttagcctcggctccctcccactgccggagctttgagacgtagcccaggcccctcatctccaggcaagttggacggctcagcacagagcagaggaccctcctatgagcccagcacagggcttggcactgagttgtgtggtggaggtggggccggctgtggtgatcagggggtggggctccatggccggcctagggtctctccaggaactgagtgtggacttcagggttcttttccttctggggaagggtaccctcagtccctctgagggagcgagcaggcccttccctggaataaagcgagagtcagtggacgtgggggctgggctgtggatgtggatctaccaggaccagggtctgtccccgccaaaccctttcttttctctgaacctcagtttccttatttctaaaatgaagcagtggtgatggcatcctgagttcctgtgagctctgttgttgaatctgacacacctccttccagcccctcacccagatccgccctcacttgcaagggaggtgggtgcacaatgggtgaataaaatcggggtgccctgcagacacacagtccctaaccattagcagggctggaggagcgttgaaactcgcagaagctagaggagtggcagctgctgccggaccggccctgttatttacagggttcagcacaaagtgaaaacacaaagccctcgttcagacattctcaagaatttcaagacagcaacagcagagcatgaaaccaagctcaggggcttcgtggctgcgcaggttgcagacctggccctggtcctggctatctggaacactccacgctgtggaactcctcgtgtgggctctcactgggctaaggaaggtgaagccttgtgtctcccagggttctggagcccgtcccctgagggttaggatgggcattgctgtgaaggagccctgggcctccaggacagggcatgttccccacccttaggtgtcaggaggagcgggtgatgggctctgcggggagcccccggacatcaggggctttggggttggctgggactgggcctgaaggacaggttctccctcctgtctgcatcagctgctgtatggatgctcattcatgtcctcatggactcacccactcattgatttactcaaggaaagactgatggatttttccgctctgtgctgggctcacgggggtttaggggtgggtgagtccccactgtcatggagcttactgcctggcagcctcaggggcgggcaggttcgggaattccaaagaagctgaggtctccgcctggggtcccgggttgacctttcagggtgcagggctgctgggctggtcctgggtggtagtgcatcggaggagccctgggcatctgcttgtcccgtgcttaggaggcaggcatcacagaggggggagggcagcaatgaagtgcaaacccataaaagccctgggcctgggcacaagagctcctggctctgctgtgtgcgatgccacaggtcactgggcggttctgtgcctcagtttcctcagccgtaatgtgagaacagtaatatgggcccctcccagtcgggggggggggggtgctgcgagagagtggatgagtcgatgcttgtcacaggctgagctggcatagatttggaacccagcaccctggctccctggcccatttggtgacatggctttgggagaataggaacagattcgtgcactgccttccccacggccgggaggacgggaggcaagaggatgagacgtggggtgatgcgtgcatcctgacgagcctttgaagtgatgagtggcagccgcggccgacctcttgtggacagcagtagctcttctttcctcgtctgttgcttggacattcctggccgtctgggaaagatccctgtgggctgcgggctcaggcagcctctggatgggaggagacccttggcaatggccggagctgtgtggccctgactcacattcccgatttttctcccacccagatcaaagagccccaaggctaacacgtcagccactgaaaaaaactgtcccggggatatttcatttccaaagctgttagctgagggccccagaagggcatgtcgtaagtgttggttctttgaaactacttttaatggaagtttcttctgaaaacacaggctttcagtgtggcagtgaagagcccaagcttgacgtcgaattgcctgggatcaaattctagctctgccgcttgctgagtgtgtagtttttggcaaaatattgaagcgctctctgctttagttccttcatctgtaaaacagggataataacatgtggctcctgggggcatgggggcagcacctcttcggtatccctggggcattgcgggggttgctgtaactgtggggctcgtcggtggcagggctgaaaccagtggttattagctatcattattctgaatgacgacggctcctatggcttatgggtcatttcacgtttgctactgaatatttaatcgtcaccgtggcatcatcatggactggaaaactgagctgtgttgaggtcgacggtctgctagtgcagagccaagcgtggaacccgggtggtctgacctcacttcagggtccttctccttgatgactgccgagtcaggtccttctccttgatgactgccgagtcagggcgtggtggggctgccttgctgtctggcttctccagcactggcccttcctgggcgacctccttgtttcagccctgggcaaagccaacgccgcaggaacccaaagtcccatttggcttggtcggttgaagccagtagaacgattctgtccccaagacagagtggaagggggtcctcttgatggaaggagtgcggtggtggtggggaggtgggcactggcctctgcccgacttcactgcataaacgatccttcctttgggtaaagtcacctgtatttctttcagtgagtggtgtgagtgcttgttatatggcaggtgctgtgccccgcactggggagataaataaggtccccacccttaacagtttatccctcagcagtagaagcagaccctgtgagctgtgtggggttgcagggaggtccggcagggttggagggggggtgtatggagggggcattgagcccagtgtcgggggccttcctgggggtggtgtgagtcaggctgagatctgaaggttcagcaggaattcaccgaggaaatagggctgggggatttggggaagagcatcccagggtgaggaacgccttgtgcaaaggccccaaatgctggggtttagaatgagggggtggactggtggggactctcccctcgagggagggggaggaggaagcagtcttgctgggtgattgggtgactgtccacagtggcagagctggaaggtacaggcaggagtgacggggatgtgaagccagcctcacagcagggtgcgccccaaacccagcagtctgcagaaaggcagggtgccctccagagccgagctccaccccccgaggccagggcagagcctggatctcactgctccaagatcagattgggagggggcagggatttcctcctggatggggccggatcaaacagactttgaggtcccttccagctgccactctaggctgtacaaaatcccctctgggaacagcgtgactatatcaaatatgaatcaatgggttaaagtccacaccctgtcagctccccactcctcggagggacctggctctgacggcaggctgtgagctgacaagagaaaatcgctttgttcctgagcatggcatagccaatctggccttgattgacaaggcctcgcttttttaaatcatcgccgcctgtaagatgcacactgtcccatctcgggcaacagcccctcctcatgtcctccctgctcaaatcaccagggaaagaaagatactaggtcagcccagctgccatctgtggaaacggcaccttaggaccgagcgcagggagctctgcttccacggaggagcccgaccgttggggatgaccagggtggtgaccccaaataacgaggctaacagctgctccaaaacccaaagctgttcccatcttacctcccgggggctaccctagccatgggagtgttaggaacagctaacagggactggcagtgagtgaaatgaaatttgatgtacatgaaaacgcagtggctggtgcagtaattgggaaaatctttttcccatcagggccggtgcatccttattccccaccccccaactttttttgtttacacagttatttcaaaagacagttaggtgctcctaaacacttttattttcatttttataaatagttgcattttctgcacaggcctgaaatgcaaacagcgtggtcaggtgggccccgtgtgtgatgaatgaatgaatgaatgaatggtctcaacaacaagaaaaacgtgtgtgcgccacagaggactcctgggcccccaagcatcttggctgtgcctccccaggcaccactccaggacaagtaatgacagacggaccacagggacctgctctggtcttgggtggcagccccagcagctgtttccagcaggcttaggggatcctctaacgcgctggtggagacagagccctgtctccagaagccttgccaaatgcgctccatcctcacatagggaccactgccctggcactccctttgccacagtttgggattgtccagggctgggtttgaattatttccaacaaatggcagctactgtgtggatgtcactggattcagatgttcccagagtcattctgcagagcacaagcaagtcctcagagcagaaataagcccacgtctaagggctctcatgtagggtggcccagagcctctcagggatactgactaagagaggcccctgggcggctgttatttagagaccccaaattctggcacggagtggtgtcactgtacctctctttgagaaccttggcacccactgatttctgccttttactttctgttaacaccacaggtgatcttgatcctgacgaagtactaccacgcagacatggggaaggttctggaaagttctctgtggcggtaagtcagcccgatggcaggcctttctcttatgcacctgcgtgccatcttcccaggctctcagctgaggaccgagatccaaacacctcactgtggcagcccctgtgagtcagtggcctcgcaacttttctttggctagaaaatgcataaaggaaaagttgaaagtagcttaacagtttgggcagtgggtataaactgcactgcagaatagacaactgttcagaaagcgtcttggctttcttttctttctgtttttctccccgcttcctttttttcctccccggaggaggagggtttgcattgtgaattcaggtcagtgcacaatttcccttcacttgtgctcagaacttcacacgcagctcctggagcccaccaaaggctctgattatcctcattgtttgggcgtttttctttcttccaggcttagccaaagagcttggtaaataaataagccactggcgatgggggatatctctttatgtgtgaaatgtgaattcagtccaggaacattagattgcccctttgatgttttaaatgagatgagaaagaaggaggatttgagaacccattttggttatcatcctcctcaatatttacatccactcacccaggaagggtacagatggtccccagcctctgggctgtggtttcaaagcttttctcctgcaaaagattctctttcttccatgtaccgattaccacctccatgttctctgggtgtgaaaccattttggtttccaacatatgtttctcaagtaataattaattcattttttctatttgaaatccataaaaagatgcctctacctgctgatcaggacctcgagttggtttattttccatttttggctttgcttttagctaaggggtttggtgattcattctgttggttcttacggagggatttctgcaatgctctgggaagttgttgaaacatgtctggagttgggttctttctttgtggtagaaggaatggcatcacctggagcccacaggcctggtcatctgtgctgctaaatgaggccaagctcagggtttaagacactcacagtcccccgagtagtcctcagccgctcccagcaaaaacgcttttcctagaagctcttctcggtgtggattcactccccagacccactggtctcttctaattccgtcgtcaccaccagaaaacggggggtgagtgatgggtcgtatccctgtgtagaggacagatgttccctgccacggccccccgttgctttgtgtgctggtggggttgctttaaaaatgtctcgttcctccggtgctgggctcagcagtgttcactacttcgagacgagagcagaaaagtgtaagctccgtgggccctgtgaaatgtcattgctgctctttgaaaatgtatgttccaaggcaggttttggaggcaacactcctggacagggcaggcccagggagggcgccttcactgctgggcagagggtctcagggtgggttcctcggtgacaaagcggacggagatggtcaagtcttcttccagcaaaggccctcagttagctgatttgccccaactccagtatgtctgtcaagtgctgggctgcagtcctccttggcatggagggatctgcctggggatacccgcctcacaagtttccagagtacccgcttccctcccctcactgcagcctctcagcatggctggatgtggaggcaatgagactgtgtgaagtgtcttctgaacagggaacgatcttttctttcccggtgtgatctgcacttatacgacggagttgccggcttagtttacgtttgctggagtccttgtgcggtgggggtggggtgggactgactgtgtctggccccctggcatggggcccaaaaccacttacaggctccagacaggattcctcagaagcaggtggcagcagagaggccaaaccacccactcacagctgctccaagggtggggtggtggggacttccttctgctccagagagcctccgtctccatgtctgttaaatggggataagatgcccctgaggggaagttgtgagaactgaatgaggaaatgtgtgaaatgtccctagaacagtacgtgatctaaattcagtttttctccaaagcaaattgacagattttaattttccgtgttcccttctcatcactgtctctatacccagatgtttcttcgcctttattaaaaatgcttgcagagacattagtcatctcaccaaagttcacccacatccctacccatcggagcaattactttctttgtttatattatcttttctgatgctaacatatttatataggtagagacacagaatgcagttttatattctttttatcatttttaaaatatgtttctagtttttccatgtagtgacagggtctgcgtcatcatttcttttatggctgttacgagcccctggagttggttcactctaatacttagctgtccccttattgatgctgccataaaaaatttaagcaggtagttttcattttcattttgttccctggaatgaatcagttacatgactgagccagggagtgtgaatggatttacagctggtgcgcagtggcattcaattcttcctcaagacgaatgtgcattcccacctgggcagtgccctgcatcctgctggcgacttttctaactcctgctcatttgacaggaggagctgagggcaggaaggggacggcatcattgctttaatttgctttttttttgttgtttgtttcctagtaaggaggaacagttttctgttttaattactactcacattttctcctttgcacattacctgctcctgtcctcaccctctgttttgggactcacgccggaagatggtgctaagagttgagagcttgccatcactctctcttcaagatgctgcttcctcccacccccaccctctgtctgcatttgaggcccctgtggatggaaggctggcggtgccctcgtctggagagcacatattaaatagggctattaaagacacaattaatgaatgtgcactgagtctcctaagaatccttctgtgtaattgcaataaatacacttttaatgacaagtatggtcttttcattctgaaagtggctcgaagctgaatgtgtttttaattgtcctgcatttgacgggccgcatgtcagcggcaccccctcctggcttccctgatgatccagtgctctgcccctttcttcttgtggtggtgatgggggtctcctgctcaatctcaggcccccttgaatcggtgcaaaaggctgggggtgaggagggaagcaccattcttccctggaaagcccctggttggcatcagggtttgaagtgtgcagggcgtgctcctccacgtggtcttgccctcacaagccacagaagccacagagggttgagcaaagcccaatgtgtagactgcggggtctcaccagaggcacaagaaagtcacttagaaaagcccttataaagtgctgcagtttgggccagccagggaaggcgtgagttcaaggtaggtcctcccagaggttttccccgggagaggatctggtacagcacttctcagactccacgggcactcgaatctcctgggatcttcctgcaagggacacatggtcagattccaccggtctagggtctggagggcaacccaagactttgcatttctaacaagctcccgagtgctgcccatgctgctggtctggggaccacacttcaagtagccagaggttgggctggttaggaccgaggtttaaaatccttccagggtacttgaaataacatacaagccataccccctgcaaaaaccccacccccggctcctaccccatccccagtctcagctcctcccactctacctcttactgttcagtgtccagtgacagtagcctcttggctgaccctggactacactaagctcagtccctgtaagggcttgtgcatgctacggctgctgcctggagtgcatgtggcaccaaccccaggtactggatcctgccccccattcagtctccccataaacctcttttcttcaaagaagcttccctcactactcagtgcaaagaggcccccaggcattctttataacctctctcattgaaatgtgggagttcctgtttatggtttgccccaccaccaccaccaccaccaccaccactagaacataggctggttgaggatgcgaggatggagacctgccaggtttatcttattgatcaccagatccctggaaccaaactcagatctggcataggagatacatgttgggcattggatgaatggattgacagatggacagccgggtggatggatgaatggacagatggatggatggacagatggacgaatggcttgacagatggatggatgaatggatggatggatgaatggatggatggacagatggatgaatggattgatggattgatggatggatgtatggatggatggacagatagatgaatggattgatagatggatagaagaatggatggatggatgggtggatggggagatggatggatggatggatgaatggaagaataggtggatagattaatggatggacatatggatggatagatgaatggagagatggatgaatggatagatagatggatagatgaatggatggatggatgaatggatagatgaatgaatggattgataggtggatagatgaattgatggacaggtggatggatggacggacagatggatgaatggattgatggatggatgaatggatggatacatggatagatgaatggatggatagatgggtggatgaatggatggatagatggatggactgatagatggacagatggatgagtggattgatggatggatggatgaatagatggatatatggatggatgggtgggtggatggatggatggatggacagatgaatgaatggattgatggatggatagacagatgaatggattgatggattgataaatggatggataggcagacagatggctggataaatagatgggtggatggactgatggatggacagatggatgggtggatggaagaaaggatggatggtgatgtggtttttgggaaacactgctgagaccgagaagaccctttacatttacagggtcatcttaggggatgctgtggaagccaggaaatcagagttggctctgattctgtcaggaggagcaacagggttctgcaagcattctgagctggagagaaagcttaccttgggctgctccctatgtcctgcctcctgctgtgatgcagcctcagggatcacccttgcttcacactgagcacggctgttgggcagagtggatttgaaacagagggacagtcctatagaccaggggactctgtgcctgtgccatccctgaacaaggaccacactaatgctgggccaaccctaccacttcctgggtgcatttgacctcaagcaggaccttcatccaggggcagtctcaggataattgggggtggagctggtctcaggttttctctagaatgacttggttgaatcctctcctttttgttagggataggaagtgattctttttcgttatcttcactttaattaagaaatcttgaacatatcctgaaaagtacctaccatggtaggacacatgcccaggtactcatgaaacagagccaaatgaatgttcactaaataatccatcattgccttcttcccggcctcccctgtggttaatttggggtcgcatgattagtgtgggccagtggatggtgagcaggaataatgtaggtgccattgaaatttagggcttcagtttttaccacaccagagccgagtccagctcaatgcctgtaatctagctgtcatcaatgtcaactttttccatatatgtttggaattgctctctctcaaagaaatacactatgatagcttctctcctccatcctctcacacccaccctcaccacccacctggaagtaacctctaccctgaaattggtgtgggtcatcccccttttatattaaaaacataaaacacaatatacacatcataatgtatcttgattgtctgtctgtatgtatatatgtatgtctccctgcaatcaatatgttctgctgcttagcttgttttgcaaagaatggcattactttgccttttgaagtttgctttatgtgcccaactttgtttaggtaatttgtccatgtagcacgtgtaatctatttgatttatgtattcccctgctgtgggagagctaggatttctatcctgagattttgccactccaatcagggctgcagcgagcacctgtgaacacgtctccagtcagatgcttggatagggtggaagatgtgtgcacaactttctttttctctacctattgccagcttatctgtgaggtgactcactgctccacaccttggagtcatcagactttccatgtttgcactcaagtgggtgtgagattacagcttaatcttgttattttgcatctccctcatacctggtaagatggaacatatttttctgtgtttattgactttttgggtctcgtcctctgtgactcacctgctcatatctcgtgcctgtctttttacattgggttgcttaactttttcttgacccgtacctctctactctaaaaagcccatgtcatttccaggccccttaattttaagatgtgccctccaaatgtgtcttgaactcctgccaggtaccattcattctttcccaacaccttctaaggaggtttcctcctaagaatgttttgccataccacattcatgtctcgaagtgcaattgttagaatagcaattctgatggatggtgtattagtcagctatatggcaataacgaacccagtggcatgcactcagcatttattctcacatcactgtgttgactgtggtttggttactttggccaaggcttggctgggtgttcaggctgttggctgatgggcttgggtctgcttcatatctgtttatactgggactcgagctgacaggaacaggactgaggccaccaggacatgttcttcttatgcagaacaccagagctcaggaaccaagctcaaccacacaagcacattttaagacttctgctcaactcacatttgctagggttccatttgccaagccatggtcaggttcaacctcagtggggcagggggagtacagtttgaggaggttggtggggtggagggaagggaatgcttcctgaatggtaatttaaggtatttcaagtaatagctgattccagagaatacatatggtgtggtcatatttgataaatatattttagggaagaaagtttcagatttctttacggtaggatttatcagcgtctctgatacactaatacacattatacttctccaggagaaggttacacaacatttcttaatctcatttaattccataatctttaatttttctttaaattttattatgatttatatatatataaatttatgaggtacaagtataattttgttacatgtgtagattgcataatggtgaagtcagggcttttggagtattcatcacccgaataatgtacactgtatgcacgaagtaattttgaatactccacccccccgtaccccatcacaattccaagtctccactgcctgtcattttctctgcctccatgtgtgtatatatatatatatatatatatatatatatatatattttttttttttttttagtatccatttatgagtgagaacatgtggtatttgttggctgtaaatatgtggctttatttctgggttctacgttctgttccattgtctttctgtgtctgcctcgtttcacttaaggtaacaacctccagttctatttatgttgctgcagaagacatgatctcattcatgttcatggctgagtagtctttcattgtgtatatacgccacattttctttatccagtcatccattgatagacacttgagttgattccacatcttttctattgtgaatagtgctgcgataaacatatgagtgcaggtgtctttttgatatcctaatttcttttcccttttcctctgggtaggtacctagtagtgggactgctggatctaatggtcattctatttttaggtatttgagcaatctctgaactgttttccgtagagtctgtactaacttatatttccatgaacagtgtacaagagttgcactgttccacatcctcaccaacatctgttatttttttgtctttttattaatacccttctgactggtgtaagatgatatcttattgtggatctaatttgcatttctctgatgattggtgatgttgagcattttttcatctgcctgtcgaccatgtgtatgtcttcttttgaaaaatgtctatttgtgtcctttgcccacttttaaatatgattatttgttttttgttgttgttgagttgtttgagttccttataaagtctggatattaatcccctgttggatgaatagtttgcaaatattttctcccgttgtgtaggttgtctgtccatgctgttggttatttcttttgctgtgtggaagcttttcagtttaattaaggcctgtttgcctatttttgttttagttgcctgtgcttttctggtctgagtcataaattctttgcctagacaaatattcagaagagctttccctaggttttcttctagcatttttatagttttgggccttacattaaagtctttaatccatcttgagttgatttttgtatatggtgagagataggggtccgttttcattcttctgcataggacaattcatttttcccagcacccattattgaagagtgtgtgtttttcctaattatgtttttgtcagctttggcaaaaatgagttggctgtaaatacgtggctttatttctgggttctccattctgttccattggtttatgtgtctatttgtataacagtaccatgctgttttagtcactgtagccttgtaatataatttgaagttaggtaacgtggtgcctccagctttgttcttcttgcttaggatttcttttgctatgtgggctctttttgggttccatttgaatttagggttattttttccaattctgtgaaaaatgagttggtattttggtaggaattacattgaacctgtagattgctttggaatgtatggtcattttaacagtattaattcttctaatccatgagtatgaaatgttttttcatttgtgtcatctacaatttctaaggaggcgtttgtagttttccttgtagagatctttcacttccttggttaaatttatttgtaggtatttttctggtagctattttaaatgggattgccttcttgatttcattcttagctagatcaatattggtataaagaaacactgctgatttttgtggcactgatttggtatcctgcaactttactaaattcatttatcaaatctgttttttcatggactctttagtttttccagctataagatcatgtcatcagtaaacagggataattttacttcctcttttccaatttggatgcctttcatttctttctcttggctgattgctgtggccaagacttccagtaccatgttgaatacgagtggtgaaagtgagcatcttggtctcactccagttcttaaaggaaatacttccaacttttctccattcagtataatgttggctgtgggtttgttgtatatagcctttattattttggagtatattccttctttgcctagtttgtatgtgatgtatcatatttattgatttgcatatgttaaaccatcattgtatccttggtacaaaatccacttgattgtggtgtattatctttgtggtgtgttgttgggttcagtttgctagtgttgtgttgaggattgttggatcattattcatattgacctgtcgtttttttttgttgtgtccttttctggttttgatatcagggaaacgctggcttcatagaatgagtttggaagtattccctcctcttcagttatttttgagcagtttgagtaggattggtatcagttcttctttaaatgtttggtagaattgagtggtgaaaccattggatcctaggcttttttttttttgataggagactttatgacagctttgattttgttactaattgttgacttattgaggttttctgttttctcatggttcaatcttggtgggttgtatgtgtccaggaatttatccatttcttccaggtttttcagtttgttggcatatagttgtttatacttgtcctagtaactcttcgtatttctgtggtctcagttgttatgtctctttttcatttctgattttatttattttgagttttctctcttcttttctagtcggtctactttgttgattttgtttatcttttcaaaagaccaacttttcatttcattgattttctgtatagtttggtagtctcaatttcatttatttctgctccgattattagtatttctttctattaattttggatttggtttgttttttctagttccttgattttttaaagtttatgtttattgctataaactttcctcttcgtatttccttgctgtatcccatagatttgggtgtgttgtgtttccattttagtttgtttcaagaaattttataatttctttctcaatttctttattgacccattggccgttcaggagcatgttgtttaatttccatgtgtttgtggagtttctgatgttcttcttgtaattgatttctagttttatttatttgcggtcagaaaagatacttgatatgatttctacttttaaaaatttgttcagacctgtttcgtggcctaagatatggtctattctggagaatgttctatgtgctgatgaattctatagcatttgggtgaaatgttccataaatgccagttaggcctattaggtctggtgtgtagtttaactctgatgttcctttgttgatcttctgtctgggtgatctgtccatagctgctcataactgagaggagtgttaaagtcccctgctgttactgtatttcagtctatctcttcctttagatttattaatgtttgctttatatacttgggagattcgtgttgagggcataggtatttagaattgttatatcctcatggtgcattgacccctttatcattatatagtgacctgctttgtgtctttttacaggctttgatttgcagcctatttcattggctataaatagagctactcctgctcttttttggtttcaagttgcatggaataactttttccagcccatcactttcagtctatgtgtcattataggtgaagtgggtttctcataggcatgatatagttgagatttgtttctttattcattcagccactctataccttttcattggaaaatcgaggtcacttacattcagtactattattcataagtaaggacttactattgccattttgttgcttgttttctgtttattttgtatatcccctcttcctttcttactatttttctttgtggttaagtgctttttctctaggagtatgtttaaatccattgatacttatttttattaaatctattataggtttttgcattatggttatcatgaggcttataaaatcatatagcatgttattttaaagtgataataatttagatcacaaagaaaagaatagaaacaaaaaaaattatgccctttatcctcatctcccccatatttttacttttagttgtttcagtttacgtatttctatattacctatttctcagcaagttgttgtagctattactgttttcaatagatgtatcttctgggcttcatactagagttatgagtggattgtgtatcacaattatggtattagagtattctgggtttgtccatgtccctaattttaccaatggattctaaaccttcagggtgttttttattttttatgtattttttgcatgctagcgttttaattttttttcctttcagatggaaaaactccctttaacctttcttctaagacagatgcgggggtggtgaattccctcagcttttgtttgtctagaaaagacgatatctgtctttcatatttgaaggataactttgctggctatagtattcttggatgacagttttttttttcttttagcactttgaaaatgtctttccactccttcctggcctgtatgatttcctttgagaagtctgttgccggatgaattgaagctcctgtatgggttatttgcttcttttctcttgctgctttataaatcctctctttgtccttgacctttgagagtttgattattatatgccttgggggtagtcttgtttgggttgaatctgtttggtgttctctgaccttcctgtacctggatatttatatctttttcaagttttggaaagttttctgttattatttctttgaataagattcctaactcttgctcttcctctactttctcctgaacaccgataattcttacatttgctctttgaggtaattttctgtattttgcaggtgatctttgttcctttttattcttttttcttttttctcctctgactgtattttcaaatagcctgtctttaagctcactgattctttcctctgcttgacccattctgctgttgagagcctctagtgaaattttcagttccacaggtgtttttctcagttccaagatttctctctgttaaattactctgataaatatctgaattgcttttctgtgttatcttgaagttttcttaaagatgcagtttttaattcttggtcaaggagctcacgtatcatcatctcattagagtcagttactggtttcttactttgtccattttgggagatcatggttccctgtttgctattgtttcttgtagatgtatgtcagtgtctttgcattaaaggattcattatttactatagtcttctctgtctgacttgttttggttaaagattctttactgctaggccactgcctccttttggactctaagtggtgccttaagcccaggttctccttggctgtagtaaaggactggagtgctgcctttcccaaataggggaggtctcaaaggggatttctgggtagtgtggggatggcagccatgggttcatgcccaggagacctgtagaataaatctccaacagcatggtgctgctgaacagacactctgatttggagtcccctttggccaaattacagagcagagttttcacggctgggcttggtagtccttcctcccttgtctctgatgtcctcagggatatttctcccttcagcacttgagttgttttctatggatcatggcaggaacagtctcccgccagagaacccaagatgatggggaagctggttgtccacctcaatcccactttttccagggcagaaacagtgagttggtggtaagttttctgcaggctcagtgccaggcaggatggggacagaggcatcaaggatgtggaagtccaattttcttaccatctgctctgagtcttttcacttctctgtggctctgggaacagtctcatcttcacatttgcattctgaaatattgctggtgatcatctcagtgttgtatatttgtttttggttttctgtgggtgggagtgaagccaggttgcttctatgctaccattttggaaccggaagtctccttgtttttttctgtcttttaatgtatagaattttaacatatgttgtgaatgcagtctgaggaatttgagcagtgaagcccaacagcaatgcagcgtcctctgacgctcactgatataaagaagcatcaaagtccttctctgcagaggccaatgatggccctgggggacatccccatggtgtgaccatgctgaaattgacaaagccttctgcagagtgtcttaccagcctatgggctgtcctgggtatcacagcattcctctctgtgcccccataatgttggagcaaacaaagagctgtcatgctgattaggctgttcttggtagataacgctgagagttcatagccagttttcagatgggaaaatttaagaggtgatatgctttgccctttggtcatccagaaagagggggacttcagagagaaacagtcttacactgtaaggggaactctacccttaaggtgatgacaagcatggaaagtcctctgtgcacatagacaggccttcgtttcaattctggctccatatttcccttcttggtgacctctctgggtctcctctgtaaaatgagcctaaacattcagacctcattgtagacctcatgggctcttatgaagatgacagcagacaatgcgtgtaaaatgctgggcacttagtagatgtcagaggtctgtttccttccttctcccattacctaaaatgtcccattggcttttcaccagctgcatttttgctcccaggccagtctccctcagtgtttgctttaacatcaccatggagatctgagtttgatttaaacaagagtcacagcagatagggattgagagagaggccctgactgtaaagctttcagggttacagtgtattcaataaataattcactgtgaatcaatgatttgatgaggttaggctctgaggccttgaggtgcctttaaaatgttctgggacaagatctgaggtgactgagaaatcacgagaatttgaggagacttctcagcattcctagcccctgggcccagcagcctcttctctccatcctttttttttttttttttttttttttgagacggagtctgaatctgtcgccaggccagagtgtagtggtgtgatctcgactcaccgcaacctctgcctcccgggttcaagcgattctcctacctcagcctcccgagtagctgggactacaggcatgcatcaccacgcccagctaatttttgtatttttagtagagacagggtttcaccatgttggccaggatggtctccgtctcttgaactcgtgatccacccaccttggcctcccaaagtgctgggattgcaggcatgagccactgcgcctggcctcttctctccatcttgactttaatacctgccctcccttgggtccgggctccagggacccctctgtcactgcttctagcttctctgcctactgactttccttctttttctctttcctctcttcccttctgcctttttccttcccttgctccccctttcccatgtatccatccacctatctgatcaaccatcaatgctttcttccttccttccattcctctatcttctctcctcatttctatccacccttcccacctttgctcctctctccctccttctcattcttccttccatttgctatccatccacccatccatttcttcattcactcatccatcatcttaaccatccacccatcatccacccctccatccacctacctgcctttcctccctccatccatttaggctctggggtggggtgagctatgataactgatatctaagactcagagtttagtaggggtacagacaaggaaccaatccatgacagtggcatgtaatctaccgtatggtggggctgaaagaaccagggaagccttagacacccctactccattggagcagaggaagtggtagtcatgtaagacttcctggaaggagattcacccctggttcccagacaccacagcctcccttctcttaaagctgccctccctacatagtgctttcaacactgctacagccacgatgcctctttgtgtctgctcccagcccagcacacccccaccatccctagcatgtatgctgccaaggtctatcaagtctgtgcagcagatgccagccatccttctgtaatcctaggctgtgtggcagaaatgcagctgctggcccaggaggtggtagggacactctgcccctctgtactctggctgggcctgggtcccagcttctgctgtaggagctgcccggagtgtgtcacggcccatcggggctcaccctggtgttgtgtgccacccgcgtgtcactctcctttcctcccctgcatcctgctcactcggccttgctcctgcaggccgatggccaccccctggagttagttctcagggaaaaagcaaactggggcagaaaggggtctcaacttcttctgagtgaggctggcagcttctgctccagccagagcgtttgttctgaatttagctttctgacagtgtgcaggggggtctggcttctctccctggcagagtgacagccctgcccatccagacgaccccgtgcattctgagctcacagccagcttcctagcccataagatcgtctcagatgcttttttaagaactgggggacagatgctcagtggagatggggagcctgaaatgtcgggtgatgatttgattctgcacctgtgatcagctgagaatcgtctctcagggttggtcctcccagctctagaggattctccctccagagttctcccatcagcccctccccacccctggggcgggggccctccctgcaggtcttgctcctcctgctgggtctccccaagcacccttgctgcttcacctgtccccctgggctcagctgtcctttccccatgggagcccttttggatccctcctcccacccaggctgggtcttgccccacccctgggctctcccagggcctccgccacagcccccatcctgtccccaccatggcaggcacctccttgtctctagggtctgggtttttgtgttctctgcacctggcagaagctctgggaccaccatgagcccaggggctttcagaatggaatccacatccacgaggcatcatgcgtgaatttcagtgttaaccgcctcccatttcctcaaaccaaggtactgggtagtgccttaaggtactgggtagtgctttaagaatctcttcttaaagacattcttaatatgggcagggccaaatccctctccagaaaaattctccctcaaaaagtaccacatctttatatactgtaattataatttgtgatcatcataaacacggcgtaaaaacaatcccctgtgttaaccccacctcatgagattcgaactattcatatttgagataaatattctcactagtcttaagatgcaaatatgtacgtgatttataaatttagaattccaattgaattatgtattaaacatgttcttatgatcctccgtattttcacagctgcttttttttttttttttttttgagatagagtctcattctgtcacccaggctggagttcagtggtgtgatcttggctcactgcaacctccacctcctgggttcaagtgattcccctgcctcagccttcggagtagctacatgcgcccgccaccatgcctggctaatttttgtgtttttagtggagatggggttttgccacattggcaaggatggtctcaaactcttggcctcaggtaatctgcctgcctcggcctcccaaagtgctgggattacaggcgtgagccactgcacctgacccacaactgctattttttaatggctgtataatatagtttcacatgaaggaggtgttaattatttaaccaagtcctcatttttagacctctgagtcatttctgattttcactaatgccgagatgtaaagggagctgtggtgggtgtccttgtacataccctgccccacgtctctatgttcttagggtaagctcttctgtgtgcccttttcctcctgcctatcggattgcagggtgctgggattctggcgtggctttgggtgtgtggagggcctgtctctgaggctgttgctgatgttactggaggatgtagagacgaaagagccatttagggaagaggtagtaagatacatgtgagatcagcctcctttcctggtgtgaatgtatctccagctaaaggaaagctcgacaaggcgagacaaggatacgcttgctattctgtaaatcccattaacggatgcaggcgctgctttaggcatcaacaattcagactgcacagaacactggggccagccaaccaggatcctgccaaccagcagaagaacagaggacccagggtggtagcccacagttgcacatggcaagacctggctgcacttaggtggtaaggagccccgtcctacccccgggcatgctgggataggttcccctaggagggactttggaaatagcttctgagggatgaatagaagttttccaggcagggaagggcaagtggaacagaggaaggcagtctaggcagtgggagccgcggggcaatggcttggagtgttgtacccaggcaagttaaggaaacaccacactttgagatgaattaagagtcttttattaagccggcggccaaagagacagctaatgctcaaaattctctcggccacgaggaaggggctcgattaacttttatacctaggtttaggaaggggagggggactcaaatgtaataattctacagaagtaaaaacatgcaagaatcaaaagaatcaaaatggttacagagtgataaacaacttaaaagacaaatggttacaagaagagcaacggtaccaggtgcaaggttctaaatctttcattataattagatatagggtctatgctggacacgaactcaaggttttatgttgttattttttggagaaaattcctgggaacttcatacatggttggtgttggtaccttatcagttaattgcgctcctttgaaatgctgaggatctgtttacccaggccaactcctcacaaaacggggttgggtgaggagcccttagtgtcttgtaaattaaggggtcagttggagtttgtccggctttcctagctagagagagtcttatttacatgagaagcaaggctaggtgattaaagagacaagcaggacaaaattcaaagtaatgagttaaagtaaaaacgaggtaggcatttcaggaggctgggagctgccggggttttggggcacgccttggtaagtgcataggctggtggccaggatgtcctgttttccatggctgccgtaaaaatgaccacaaacataggacttgaagcaacacaggtgtgtcatcttacagctctggaggccacaagttcaaccaggtcctactgggctccagtcaagatgtggaccgggtcgtttctctcccagggctctaggaaagaatccattctcttgccttctccagcttctagagttggaatgcagaggctgcctgccatccgtggctcaggccttccctcccaagccagcagcgtcacctccctctgaccctttttttgttgtcccacattgttctctgaccacagccagaaaaggttctgccttttagggacccctggggtgacactgggcccacctggataatctaggataatcttcccatttctaggtccttaatcagacctgcaaagtccctttggccaggtaaggtaatatgcttgcgctgtgagcattaggatgtggacctgttttggggacctttattttgttgaacacacaggcatgaaggcatctagaacgatggtcagaagttatcagttgaaggccttgctggggcaccaagattgaacacaagatgtgaagaatcgtttctcgataacctaattttgtaaacattcttgagcatgccctctgtgctaggcactttgccaggtcttaggattgaccaaccttgacaaagaggaagggatggataggggcccaacatccagtgttgagggccctgcagaagagggcaattgggcatttcagaggagatgatgtctgaactggactttgaaggatggataggagttttcaggcagacaagggaaacatgatgtgcagaaacacagaggcatgtagcagcctggtgtggagggaccctaaggagtttagagcggctaaagcgttaggtgggaggaggatggcaggggagtgcactagtgatctagccagggttggattaaggaggcctcatgtgccggccggaggggcctggactctgttctgtaggtgatggggagttaggcctgggatttcagtaagttaggcttgtggactcgagcaaacatttggctgcagcgttcgtaggggacagggaggaggaaattgcaggggtttagggaggcactttttcagccagtgggcaaaggaggcgtggtattcaatagggtgcttggcccacagagctccccctccttgccctccaggacacagttgagtgcaaagtccaagcatgtgtgttcctggaggggctgagtctggggcaggactcagtactttgcattctcccactcccactgatgccctgtgtacggtgcatacacacactcatgcacgctcacacagacacgcacgcttcctcctccatactgacacactcacacacgcccacacgtgcatgcatgtgcacatgcacacacacacacatgcagacacatgctcacacttgtgcgtatacacagacacgcatatggacacattcacacacaagcacacacatgcatgcatgcacacacttgtgtgcacactcagacacgcatgcatgcactcactcacacttgtgcacacactcagacacacacgcatgcacacacacttgtgcgcacacagacacatgcatgcatgtacacacacgcttgtgcacacacaaacatgcatgcatgtacacacttgtgaacacacacaaacatgcatgcatgcacacacacacttgtgcatgctcagacacacacatatgcatgcacacacacgtgtgcagacacactgacacattcacacacacgcacacatactctcgcacacacacacccacacacccatgcctctgcctgtggtctgcagaagagcagagcggggtctcctgctctttgcattaaagtgacattctgccctggggatatgatgcattttaatgaagccccccaccccggggtgggaaacacgaggaaactgtctttgttttctgttatgtagtaaacctcgcttgagtgtgcactgaaggatggagccataaacctgtttacagggcaagcagcatctgggattatgccggcggccgagtggcatgaagggcgagctagacttgtccagggatgatgctctttttataagggtccttgtggagtggctgagagatggcagcgccaggaagcccaagtcctgcctttcttggagccctgcttttcctgtccacaaaatgggagctgacaggattgcatatgggccactctggatggagtttgcttagcacaggggctaacacagggagcagtttttattatgctacggatggtagcttgggggtagaagctagtgtttgtctgagtttgggagaagcatgggcaccctaattctggaagtctcagctctgccatttatgagtgaccttgggcaagtcttctgctgtttctaatcctgttctcccacctttaaaacgggtctgctgagatggggcaaaggtgctttgtgaggtcctcagtgactgtgggacccgctcttcccggaacgtggcccttggcccctatcacttcccctgaccctgctgggcctcggcttgcccaggcgtgcactcctctggtccctgcatcaggcctctcctatctgcagaagatgcagagagctgagtcgcccttttcaattcaatggggagtgagaagcggaggcctctgagccagtcccagttgggaacgggtcgctgaaggctcccagggcacatgaagggtgagggggagcagccccaccaaggggcaacaagttttcagttgatgccacaggaaaacataagagtgagccagcagaaggctagaggggccctggggtcagtggagcttcatggctggtgtctggctcatcagatgtttatgaagcccttaccaggcacttggcctgtgtcaggtgccatcagctggaggctcttaccagttacgctgtcacttcttcctcctcctcctcaccacacccaccttcccttcctccttcccttttttctgagtttttctgagcgctcagcacatttcaggtgtaccctagactccggagattcaatgttgaatgaggcagacacagcctctgtccccatggggctcgcgttctagcagggaggcagacaagtcactgggtgatgcccattcagtgatatgagctgtcccatagggaggaagtgctgcggaagtgcacgggacggggcagcaatgcaggcccaggggtcaggctggctggcctgggggaagtgctctcccgccaagacttcaggatgaatctaagttagccaacagttagagggagtatttcagagcagaccacccatgcaaagtctgagagactgacaatggatgggacattaagcgcgaggtggagttggcagggcgcaggactgtgggggtcacagagatcattgtctccactccacgaggacccttataaaaatagtatcatgtctcaaaaagtctagctcagaaattagaggtgatggaagctgtgccctctgcgggatgaacattgaagttgcagtgagggtgatatatcagttagcttttgctgcgtaacaaatgacccccccccccaccagatttgtagattaaaacaacagtcattcattgagcttacgattctgtgaatgggcaatgtgggctgggctcagctggctggatctttggttattgactgggctcaatcttacatctgtagtaagcagccaattatcttggtggctctctttctgaggcttggctggcctttgcctggggcaatggggaagactgggccaaatgactcttatcctccagcaggttagcctgggcttatatacacagggcacctgggcagaggttcaagaaagaacggcagcacataggtctcaaggcatggacttggaagtcacgtaagatcacttctgcaaatctcattggccaaagcaaatcacaaagattgacctttattcaaaaagtggggaaataactccacttattaaaggaaggacctttgcaaatgggtgtggatacagggaggggatgaattgcagccatttttttcaacagaggtatttggtttggagaagagaaggtatgaggctagttcccaactgctgagtgctttctggggttcaggagacaggcagttccatagggtcctgagggcaaagctaggatccaggactccatctggagaagacctttttgctgggtagaggtctctcatggggtctggctggccttggacactggaggaaccaggaaaggctgtgtgagccttggtgagagacacatggccagaactcaggttacagagaaagggtggcctctgaggttatagcaatgggccttgtattgaatggaccacatgctctggttgacctttgcagtcagtgctccaggcatccaatcctctgcctatttgcaaagcgttgcaataaagagcccataatctctcgagtgcatggatttcttcctgtggaagctcatcagtttctcacttttcctctgtaaacactggtgttttgagtcagccttcttccaaggcgagctggtgtcatctgaactgcagattggcaagccgtctcagacaaataggcctctctgcactggtccaaggacttggctgagacatgctgggtctgcaggacagtgtagatggaagccagatctctggatctaagaggcagcaagctatgtcagggtaggcttgctgctgtagcaaacagccccagtgattcagtggcttcctaggatgaagtttctcacttgtgcaatggtccaatgtgggtattcctagccaggtgcttcctgggcagctcttctctgagcattgtgatgcagggactcagattccttccatcctgtagctctgcacactcctctcccgctaaccagggcctaagagtcctccagtctagcaggccggggagacaagagagcatggattatacacagaggacttccagccacactctgtcagccagatctcagccactgggctgctcccatctgcaagggaggttgggaaatgtagtccacaatgtgcctggggggcaaggatttggcttgtgaacacccagctggccccagtagaaaatggctgcagcaacgccagttttggagtcagcagacttgagtgtcaagcaggctctcccatctcccatctagggctctctgggcctcagagtccccatctgtaaaatgggcacagtgatattctccaccttgcaggtttgtgggagccttggatgagatcaagcagtgaaagcaccaagccatatcctggctgggcacaggtcccaggagagctagctgagactcagagagtgtccagggctcaggtccagttggcacagcagccagtggacatgtgggggcactggagaggttctggcagcttctttcatgtgcagctggaggcagacctcatgggactcaggaaggcagggtgtccagtgtggccatggaaggaagtctggtgtcactggaggggctgcacaccttgcctgcttgtcctctttcctgacgccactgagcccattgcctcccctgagccccgtgccccatctagcaagctagggcagtggcagtcacatacctggagaggactccgtgggattcaggacccacacggtcctgaggcttcttcttagaccttatccaccatgccccaccagccagcccgcctgccaccgtcacaagctggagcctgcacggcatgcttgatgccactcaaagcttaagtaggttctcggcttggcgcggagcctctcgcttgcctcctctgcccgcctgtctcctctgcctgccgttgcaggggacagcagggtgcccagtgccccactcagcacgtgcgtaccagcagatgtttgccatcactggtgtttggttctgccctcctccttggagatggagacccgggcctggttcccagttctctcttgggtgctcagggaccctagggctgtttcgctccatcccttgcccacacagtgtttgcatttaaacttctgcttgggtccccagcacaagctgttggctgaagccccagggaaggcactgggctctgcagtgagtcagagggggcacccacctgggtcatctggtgcaccacgccatgcgtttcccacgagagtccctgttcccacagcttctcctgtgtctcctctctgctctagagggattgcatgagaggtggctaagaacgcaggcttgtggacctgatagatctgagttccagtcctggctctgcctcttgttaactgtgtggctttcgggaagtgactttccccctctgagcctggtttactgcatctgtgataatagagttgctgggttgcggggtccagtggtaatggatgtaaaacacagagcccaggcctggcttctagccagcgccagggaatactcgtcatcgtcgttcatggtcattctttagcagcactgtacttcttggcaatgggagtgtggggggtgaggttcttgccccccataactccctttgtgtgtctcctaagccacagcctggcctccctctccagtggctccggggacagcgagtgactgtgcacaggctcggccctggggtctggagcccccgctggctctgtgggacggccactgcggcccctctctggtctccctgttcctgctttggcctcctccagtctggagggctcctgtcactgaggcctcctgcctgccaccttgcaaatgaaatccagtgggcttgcaggagagggagtgcaggggctggggcgggcttgcaggagagggagggcaggggctggggcggggctgggcatcacgctccctcccccatggtcgaccttgagatgctcacttcccttgtcgacccccacctcctcatctgtgaactgaagtgggaggggttgaaccacaccggtgcagtccagcctggtcggtgccccctttgctacttttcctccatgagccctgcatttcggaaaaccaagtccaccatcttgtacgggttaatcgtcacccacctaacgtggtcagacacgccacctgggttcagcatgtcagaacctgtgcctccgtcaccatccattctctgaccttctcctgtcactgccctcttgagtgggccacctgggctgatttgtctcagagcccagctcagcctcctcgggccatgccgttctctgggacaaggggcccccaggctgggggaatgtgctgcccggagcctgcagcctcctctaggtcctggatgccctgcccgcttctacagcctgggcaggcccctcccgtggccttcctttccgtggacactgcccgtgggcccacaatggctgcctagggagagaggtgtgtggaccgggctggtgtgtaggggctggggtctacactcaagtttgagaccccctgctgtgcaagtcagagctgggggcagaggtggggtggtcccaggcccccttggtgctcctgccctaatccccttgtgtgtgagtgctgggctaggttgccatccaggccatctctcagacccacacactccttagtgtctccctcatctcatccacctgcaattcctccaggatgtcccggaacagggacctcctctcccatcctgtggcaccgccgtctctcgcctggacgccacaacccaggtctccctgcgcctgcccttgtccccgagagtccgttccaacaccaaagtgaacttcagagagcacagaggcctcgtcactgcctgctaataactgacccagggcttctcagcacacccggaggtccatgcagcctccagggcaccccgcggggatccgcagaccacggcccctctccatggccagatctctaaaggccctagtatgtacccgccccagcacctgccacccctcccctaccccccacccctctctccacttctcagccttcaccccagctcatccctcccagggaacttctcctgatctgctggctctgattcctcagatgccagctgaaggccacctcctccgagccactccccgcacccatccacgctaggggaaggtgccctccctgttggaggctctgactccgtgctgttttctcttcattgcactgatcataaccgctcaggccttaaatgcattattgctgatgatattattttaatgcagtttcctgttagaacattataattgttattatttctttatctgtggcctgtgtgtctgctccattaggtgacaggctcaagggagcagcatccctggctatgtggttcactgttggattccagtgcctagagctctcctgtggtgtggaaagcaggggccggaggtttttgctttttagaaacagggtctcactctgtcacccaggctggagtgcagtgatgcttataactcactggaggctcgaactcctggccccaagcagtgctcccatcccagcctccctaagtgctggtgttactggtgtgcaccaccacacccagctgagactggacatttcatttgtcctgtctgagatgctggcttgtgatcactctttgggggacaggtcagtttcgtgcccaggaccagccctaccctggcctagcacctggcatgagtcggtgctcagggagacccaggctgccccacggtgagctctggggtggatgactttcttcagcttgtttctttagaaacagtggtgtgctgatgaatgttgaacaaccagctctccaggaaaacaaacaaacaaacccagcaacactgatttgtaatgttggccagttttcatggtgtaagttctcccaccgtggcggccagcgtcaagctgccaaagtgacatcatcacacgcggtgttgggaagaggcacactccttgctcctcagcaagggcccaggcatgctgtggcttaggaggatggcagggcgctccgtgtcctggcatccgtgggtctgtgcacagctgggaggatgctgcttacccagcggagagtgggatgttgccagctattcccaggaccttggtccctggcctgtcaccctgggtctcacattgttcctggccatgtgtgaaaagcgggtggtgggacagagctgcaggcttggcccagcgaggggactctgctgtcattagctgtgtgactctgggcaagctctaagctccctctgagcctctggctcctcgtctgaagggtagggtggggtggccattgtagatccttcaggaaaccccacgatggcaggcagtggcaggcaggaaggactggcaagctctgtctccagcctgggctctctgggcctgagctgtgtgtgaccgtggaaacatcccgttgtccctctggcatcactgcctctgtccacccagtgtgaacgctgtgcccagccccttggctataaaatccgggtccacacagtcctctgaattgggggaggaaatgcaggcttggaaagatctagaggctttcccaagtcacccagtgtgtgggtaacagagccctcctctttgccgctcctcacctcctcatggtggcaggagcgcccccctctgctaacgtgacgtgtgacccccgcactccgcagggctcacagcagctccccagcccagagtccctgtgccggggctctcagcaggacaaagcagtgagggcgtgcgggcaccgtggtgggtgttctgcatgggagatctccttaagccctccctaccatgccttcagcacacacaggcccccacatgcccaaggaaggctgcccagtgagtgcgtgttggggcctgccctaaaatcaaggcctgagggacattggaccacacagtgcccggcaccacctcccgaggggcaggcactctgctcccaggacactggcatgggtgctgtgccccggagggccgcggggtcagcaggaaggtggaatggatccctggccttctgtgaccttgccccatctgtgggccgagctcagggacacaggatgttggtgcagttccgggaggtgccagattccacaggctgcaggggtgcctcccctgtcctgctctctccagcctctcacgacccagagcctcagatcctcccacaccagaatccactaggaacagcacaccacgcaggagcctccgttttcggttttgctgaatgtcccaaatccctggcccttgatcgctgtggggtgaccttcggctccagagaccccaggactggcctgtgtggcctttggcaagcacctgctctctgtctccacagccgcagcctgggcaagagacgtccccttgagatgagatgaccccgataaagggccttgcctgtggaaggtgcactcgcttctgctgtcctggtttcggtttcccccgtgtcctgggaatggcagtctgagaaactggtttgggagtggcgagacgttccccttcattttgcagttactcccactgtcctaaataaatgatacctaacccctcctggattagaagcccgacacctgagcggctctgctcctttccttggtctcacagagaaacgtcagaggcttctgagccgtcaaatggttgtcaggaggcccaggtgccaaatcacactcattttacagcgggaaattcaaggcctgcagagggcccagctcagtcttcaggtgggtttggtttggcccggcccgcagtggaccgagctgtcagcatttaggaattgcgagttctcacatgaccagcctggggtccccacctcgctggagaaacgaggaaggggcggcagcaggcaagcatcccgaggcagggacggcccattggatggggcctaggctctgcctcgtccacacttccgggccctggcgctctctgagcttgtgccccaatctagtccagcctcttctggttacagaagggaaactgaggcacaaaggcatcatgatcccgtcctggggagttagacccggagcacaggtctcaggagggccagcccctgggtcttctgccccgggatgctggaggcgtgggcagtgttgtggttttcattctccatcgcttgctgttcatcagtgtatgtcctcccgaaacagatgcactcacaaggccgccctgtggctgtagacccagaggagaaggtggggaggccgggagttgcgggccagggcctgtgttttaccttgtggggggaagccctgggtctgctgttcctgagacatttttccccaccctcaatgagtggcccatcggatcccggggctggtggctttgagccaggggaggcccgaggacggctttgctggctttgcaggtcagggagacagtccagctcctgaagaggccttcccagcacacactgccccgctgagggtggcccctgggggcccattactaagaaccatgttgcaaagtgttgtaggccaggtgtggctcacacttgtaatcccaatacttcgggaggctgaagcaggaggattggttgaagccagtaacttgagaccagcctgagcaatgtagcaagaccctccagcattctccctctgtaggaagctcagggagggttggtgtcatcagcccgatggaaatagcacatgtactgggtgtcttgtgtgtgccgggccctggggtgtgctcgatgcggtcacctcatttcctccctggacaaaccccacaagagagggtacctttaccctctttgtgtacttatgggatgcctgaggctgtgggctggtcagtggcttgcccagggtcacacaggtagcgagtggtgaggcgaggccctcccgcaccggcagtgaagcccgtgtttctctgcattaacgtctggcctcccagaatccacatctgctccggcaatgcccagttgtgctgagcggggcctgaacccggataacagtgggggatgtgttttggagcgatggggccctgaggacaggcttcctggggcagccatggaggctgggcccctcccaccaaggaagggcttagtggtggggggcacagggaaagagcggtggttccattgagccctcgcctgccttgggccacggcctcccagggtgacagcctggatctggagagtttgagaggtgctggggagaatcctggcgcagccggagctccagggtagcgttaatggcagcatatccattgtgggcacatggagggtgacctagggggcctctcggtagaagagcaaagtcttgtgtggctggactcaggctctggggggggctttgagtcactgaacatggctgtttttatcccatcccttgcttcggagccagactctaaatgtgatctaagcataggcctggggcctcgggcaagagcactgtccctccctgggctgtagaggtttggaaagagaggggggccaactgtccccgacttcactcctgagcttcagcagtgggaggatgggccagagcacctcatggggacgggatgagacggtggcaggggccgaggagctgggctgcgcctgggacttggagcatacttcctcctgcctttggcagctgaccatctgtgttagtgcgttcttgggttgctataaagaaatgcccgagtctgggtttcattggttatgcaggacaccccaggaggtggggtgctgggatctgcttcgtgtgagactcgggaagcttccagtcatgatgggagggaaggaggaagcaggagtgtcacatggaggcagggggcaagagagtgggaggcagatctcacgtgaactgaggggaggactcattcatcagcaggggatggcacggagagcctttcctgagggcccctccccaacgatcccacaccaccgcccccccgcccccccgcaccaggcccgactgcaacgctgggaatcacatttcaacaccagctttggagggggcaggcatccgaaccatatcaccacccctgagggcggggggatggaggttgcactgcagccagagggcaggaacaggttcgctcacctggggtctgctctgtgggctcttctgggggcacccatctccctgagtttccatacccagactccatccagccgtcatctgtgggtcctggggtggggcccatctgcccgtggcttcacctggaccatggaggacaaccttgttttgcacagcgtccctggggcggctgctggaactgagcacaacggattcatattcatttattgaaagatgggctccatattgtataactggaaggtatggccacagctaggccttgtcagaaacacacaaccgcagggcggcatcagcacaaagggcagaccagagggctgaaagtggtcccagaagagccagcgttcattcgctcatcctgtgctcatggagcctgttccatgctgggctctgtcttggtgacaggactgtggcagagaccactgagacgaattcctgcctcctgcagctcgcattccaagggaagccaggccacagccagatagccgagtagagtcagttatggggccgagggcagtgagggcagcagagactaagacaagtgtggagtggtggtgggaatagcaggtgggggccggaggtgatgctgggcagggttctgcagggaaggcctgaaccgcaggagggactgagaggagcatgtctagggccaaacaaaggccctggggtgggcctggggtgtgtgcaaggccaggccggggtggctggagaggaaagaacaaggggaggggctgggctgcaccagggtggggtccacccggctggtggtgggttggtaagggcctcagcttttatctgcttttactgggagtgaggaggttgtgagctggcccggacttagattttgtcaggatcactgctgtgatgagactagacaggagggggtggtggcgcaggggagcccagaccccaggaaggcacctcttcaccagtctgagtgagccgagtggctggctcacagggtatgtccactagcaggattagttgtcactgtaacctggtaaccatgctgctggatagggatgtggggctgctgtgaccatttcacagacgaggaaaatgaggaaaggagaatgtaagggtttgtccaggggtggcagagttgttgacttttgacttggtgcactgcattgaggcacatgcgtgagtgtgtgcatggggttgggccggcacaccccctgcctagggctttggggaaggtgcctgtgacatcacgatgtccctgcggcatggctggagctgagcgtgggcttccctggtgctgctctattccaccccagctccccggagatgtggctgggggctcacagcagctgggcatccctgcacccatacgtgctctcagggccttggcatcagcatttggctaatttaccaggtcccatcgcctcttccgccctaagggcatttggtgaggaagacatgaagaaaacagcagcagagagtggttaaggtactctgggaaagtgaatctgccttaccagacctggaaatcacagtgtaacttaaagatctgtaaaaatataacaatgaaaatgcattttcagaggctagctggaagaacagaaaagacagaggtgtcatggaaggacttgcctagaaaagccccttcctctgtgcatgcacccggcgggcccctcccacagggcaccctccatcctgcggaggacccggggaggtggggtcacccaggttagggatgaggaccctgaaccaaggccacagagtggtggggtcaggacttgcacgtggacatatcgtgggtcgcgggtgtgaggacagagaacacacgccctgagcctgctgctccctccactactggctgtgtggcctcgggcaagttatttaacctctctggtttcagcatccacctctggggaatagaataagaatagtccctgtctcacggtgactgtgggaggtgggccatgagggaagccagcccagctcctggagccatgcccggcaggctggcaacccccgtccggtgcacaggggccactgtcctgggccctgtggtgcctggcactcgggtgtgctggggaagcttttccaggcccgcttctcgttgtaaggaatagatttgactttcatccctggaggtcacgggaagtgaaagtgggggagggagcgtggacagcatgggctgtccctgacgtgcccctccagggctcagggctcactgttcccacattgaaggtggctgtccccacggactgctcttccatgctttccaggagagccctgagtttgtataaattattcaccaaaaaaaaaaaagagacagagagagagaacatcgttgggtatatttgtatctggtttgaagtttctaacaacacatcacttctaagaaaagccccaagccaaaacaaacaaacaaacaaacaaacaaaacaaaaacaacaacaacaaagcagctggaccaccaagcccttttccaggctcccacagcccctctgcatctggtgtggccgagaaagcccgaggggcagcatccataggtgttctgggacgtcccaggcctccgccttacgatggcatctgaagaatgcccagcatgtgtctggctgaaggtgcaggtacttgctcggctctggcagcccggcgggagccctctccctcctcccaggcagagatgctcctctgtgcggcgcagtcaccacctctgggaaatccatgctcaacatctgtcttgatttcccatccttgctgggatgggtctcccaaacttctaggcccagtagggccagctgctcttctcctgggctggtatctcctctcccacagctggacagttacagcaccctccgctgaaaagccttttccagcctgaacgcggcggctatggagtcatttggatggactccttaagcctcagtctcagtgctgaatggtggtgctgccgtcagcaccagtgggcccgtcccttgctcctcctgcctctctgcctttagaccccaaggcagccactccccacgagcacttgcagagcacctcctgtgttccgggcttggttccgggcacaggggatggaggtgactgagaccctgccacaggcctccacagctttggtggcggatgagtgagtggaggggtcagagggcccctatgggggtggggcagggccgtgctcatgacctgggtgtgcagctgggcctgtggggtcatggccagtgagctccgttcatcacgggcaaccatctagtggagacgcatgtgctcagtgggtctgtgggagcagctggtacccaggcccaaggggtgggtagggaagagggtgtggggacaccccaccctgaccacccactgcaggtagctctggggtgggggcaggtgggctgagctgggccacctggcaggtgtggcgcttgccctctcccggcctctcccaggtgacctgtcgggggatttcaggtcatgtcacacatacttcccggtaggcatcctcccgactcacagccaagccagaggagggcctatggctccatcctgtcccagagagtgtgtcaggtgggaacacctaccggcaggcagacagagagcctctggggctgctcctggagagggtgggtggtctcaggggaagaggcagatactgaggccaacaacttcgggcccctgtgttttggagtctggtgcagagctgccttcccatggcccatccggtggccaggcacgaccaccaccccttgctggccttatcttttgtgggactgcccagcgggcccaggcctgcccagccaataggggccacttctgaggcatccagaatctcaggcccagtgtgcctgtgttcctggggcggtggcccaggtctgcgacgtttacttaagagctcgggtgtggcctcttggaaaacagcacccgctcacatcccgtccatccaggcctggcgcacctcttactcaagaggagaattaatccatgggcctcaggtgaaataccagcttccacccccgggactcatgtgtgcggctcccagatgtgtgagcacctgctgcgtgcagatgctgggccagctgcaaggacactgcagggtcatgcccaggggctctcctggagggggcacagtgtcttaggggggccaaacagcaggagcagaaaccacaggagcacttgaacccagatggaaaccccccccggaggctttctgccagagggggcaccggggcgaggtggaggcaccagggtaaggtggaggctgttgtagcagctctgggatctgcgccttccctgagaataaaaacacggcacacggcatttggagaacgcttgtggtttatacagcgcttgcaccgccagactctcctgggtgccccgctgggcccctgagatgggttttctggtcccagcagactcatgaatgccggtctcgggggaaaggggctccagaacgtctctgtgaattgtctcaacattcttgtgaggcaggtatgatcatccccattctacagattagaaaactgaggctcagacagctggagggctgtgttcaccgtctttgccctcgctgctccacatcccggtggccaccccagactcctccggcttttcccgggagcttttgcctggcatattttgctctcctgactttgagcacaccccaagactttccttctgctcattaccagggcagcggagggtctggggtgcaaggagagagagggaccctgtagtggctgagacatggggggggactgctccgaagcccagcagcccttggagaatgtgaccaaagccccagacctctccccggaaatgtccagggatacgtgcttgtcatacacacctttggcagccacccccagggactccaggttgagaagctctggcctgagcgagacccagactcccacccccggctgttggcaagaggtaatgaccctactagtgatgggccctcgaagcctccgtccacccctgcctccgctcaccccggccatgaccccagcctggctcacagccagatgtccatccagcagaaggtaaaggggcacctgagcccatgggcaggctctcatgggaccaccggcaacatctcagccttggagatgagagggcagccttggctgggtcagggagcggggcacatgagtgtgttccggtccagtagagatgctttcaagggcaaagctgtgcggcaccgttgttaagagagaggctttcgggatcaggaatacttggttttgaacttcagctctgctccttcccagcctccctcctcagagcttcagtttttcatttgtgaaatggggatggggaaagcacccacctcatgggcctcgctagcaggctctgggtctctggcagccacggtcacgcgtgttccccagcgtggaggtgcatctctttccatacatgcttctggcagtgttgcacagcgttgcacagcttggcggcctcctggctcctgcaccagaagcttgggcccagggcacactggtcggtgcccagcagtggggtcctggggccgtggcaggcccccaccttcttgcacacagccacggggtccatcatgtccttgagactctcaatgagcacgggctcgtactgggtgacgaagtgcttgcactggatcatatagggcagcggcaggatgctgcagccacccttgaaggccaccaggatgtctcgcttggtgctcttgctctccaagttgtgggaggacaccgtgagcagcctcttgcacccattgcagaagctgccctggttctccgcgtcccactctggggacggcacgatggcataggcatcatggactgcccgggcccgcctccggttgccacacagacggatgaacttgcacaccttctctggggtgattttggccacaagctgcaccaaggaggggctgtaggtgtccaccaagatgatgcactccttcgtgatagaggcaggcattaccgagcacacgcgctccagggcatgggtgatcatgagctcagagctgttggacatgagccagtggtccagcttctgcaccacgttcatgcacacctcacaggtcacaccggccttcatctgcatctcgctctgtttccttggcaaccccagctccagggaggggaccccgtccatggccactacttgagtcaaacgggcaggtgcccctagctcctcacagaatccccccttcctgcagagctcctgcggggggagaagcctcagtgcttggtcagcagggacaaaaaactggaagaggtagttcttgcagaggacggccaggccaggccccaaggactcacactgctcctggatgttcaagtcggccaaggtcaagttggaccggacagcctcctggagtcgggagacctgccgtacacagtcttggcacagagctccttcaggcgcctggcgggggtggaaggtaaggggcccattggccatgaacggagccacagcctcaaaggtgtcctctttggagagtggcctcagggtggccaggtgcctctgcagcggctcacagaggctgagcgctgtgcacacctgtgccggggcactgtccggggccccacggagcatgctcaggatggccgaactgtgggcatccaccatccacttgcatccggctgaagactcctggctggggagccactcacaggtcttcatcaccaaagccaggatgtcagactccgtggcgtcagggttcagcccattgccagcggcggctgctatgtcctggcatacgtcgcagggcagagacttcgcggtgggtttgttccatacggccccttggcagtaccccacagccccgcacctggcagctgtctgcagatcctgacaccacaccgtggagccctttgcacactcctgggggcctgaggtggggctggccctggtggcccccaggaggctgggcaggaggagcagggcacacagcatgctgcccagggactctctggctccagagtacccagcagtggctgctgctataaacctggctctcctgcctggccccagaggaggcacggaagggcggccccacctcctggccactcccacagcctgactcacaccctgtgcccggggattcctggcctcttcgcctttgctcttggagtgcctggaacactatccctcccctcttttcccctggataagataaactcttagcagttttctgagcctagctgatacgtgaatgaagctcggctcctaggaagccctcctggcccctgggctgtgtcccccaccctccccctgctgcagtagttcctggggttcccttccctgcagctcactgtcctctcctgacttgtgtggcctgggtcccctcctggaatgtgagcccccctcacaccccgaggagtctctgcccccattctgggaggtacggaaaggcaccctctgccttatttgctgaagatcgagtgttcccaatgactggccaccccctggatgccactgttttctaacgtggcctcagggccacgtgcccagctggggttctgcccctggctgtgctgtttggggagttagtctctttgagcttcaggtcttaaactgtgaagtgggagagctgtggacctcactgccacaccgcaaaagccacttgcaaactcaggtcctcgagcccagccggtctcttcattctagaaatgtcaatcaaaggctgagtgtgggctggtctgtagtaggcgtagattaaatgtttgttgaaggtacacacacacaaaagaggtttgtttcgtttctgtgtcatctgttatcttatctttttcttcttccttagtttttaaaatagttcttaggcaagagagtcagctgggtgagcacgcacaggcgccttgcgtcgggtcctgttcattaaatggagaaatctggagtcagcctcacctctggcctaattgccaaacagccatggagtgggcaggccagaggtttgatggcagggggctcccctagccccacatgtgggtgtcctcagctcagcttcctgggcttgggtgctctgtaggaacacacttcccagttatgtgggtcgggcagcctggcctgaaattgcaacagccacacatgaggaatgcaatagtgcagggtgcttcccgccagccctcctgctgggtacaggggtcaggaagagaagacggaaaataggatttgctgagttcttgcagtgacttccaaggactctggttgctggggaccagtggaggggacagtcttagggaacaggtgagcctgggtgtgctcagctgcaggatggcagctggccagcacctccaggtcataccccaggtggggctggagacgtgggtgtccttacctggacttggctcagccaagcacgtgttgatacatttctatgggcttatgatgggcctgccattcattcagtccatcgcctgacattcccagggcacccactcgcatcccaccaggactttgggcaccaggctgaagcaaacagaagggcctgccccttggcgtgaacgcagctgtgtgccagacttcctgcgagtctcttgagaccccacccccacggcgctgccttggtctcttgcactgagggggtgcgacccaggaggccagaatgtcctcctcatcctgacatcccttgagcctggcacaacatcccgataatgaaggacttcttggctcggcattgtctttgtatgattgacccacgctgctgtgtttagctgtagagccgacattgtcgtttctgggtagaattccactgggcaggtggaatgccccactgggccctgggtgtgtattaattaggtcagtgcaccatggtggatttgtctactcgacccttgatgggcctttggaacaattccacttgggagccagtagaagtaacgctgccccgaacacttctgtgtatgtcttggatgcacacgtgtcttcccttctctgctgggtcttatggaggagcggcacggattgggcatgcgtcgtgtgtgttgagcaggtactgctggatcgctttccaaagtggttgtgcccgttcccactcccctcagcagcatttgaggaattctgattgctccatgtctgttttgtttcggggactggggtgttttccaacaccaacgaccgattcttacagacgccaactgggagccctgtaattcctttcagttctgacaccaactacctggagttagcacagaccccacacgttaagggctcagcccccactgtagatgctaataatcacaggtccgaggttggcacctgtacttctgacgaagtggctataaaccagggtcctgagaccccctcctcgggtttgataattctctagggtggctcataggactcaggagaccgtttgcttacatttcttatttatcatgaaagatatgactcaggaggctgtgtacaaggcaaggactaggggccggggtgcagggcttccacaccctctgggtgtgccaccctcctcacgcccccatgtgttcaccaacccagaagctcatcaaacctcattgtccaagagtttttccagagtttaatctccagcagcccccaccccttcccagaggccagggggtggggctggaagttccagtcctcgaatggcttggtctttctggtgaccagccccatcagaggccatctagggaccccactgtaggtcacctcattagcataaactcaggtgtggtcagagggggtcattatgaataacgaaatacacttctgtcactcagcaaattccaagggttggagctctgtgccagaaagtggggacaaaaccaaacacttttttttttatcccatggcggggatgatgttggattacttaaaggatggctgcaagaagggtacaaggcactcccgagtacctttgcccagacacacctgccccacttgtttcgaggttctcactgcccctccctcctttcctctcacctgtctgtccacctacctagccacctacctgtctgtccacacacatgtatatatttgcacgtaatttttttataaccttcgagcgtaggtggagacattgtatctctttaccccagttactttggtgcctatttcctaaggaccaggacattctctcataaccacggtgcatttatgaaaataaagaactgtagtgtggatacaatactagaatttaacccacagcccagttcagctttaccagcagccccagtgctgccccatgtggcattgatttcccaggtccagccccagtccaggctcacacgatgcaattcctggtcatggtgcctcagaggccttccatcgggagctgatggcagctttgtgttttcttttgtagcactggggaaccagctggttattttgtagaatgtccctctgtgcaggtctgactgggctttcctcttgaccagacccaggtcatgcatcgtgtggggggccattgttgatttatcagcatgtgtgatctttgatcacttggagaagatctaccagcttccttctctgtaaagttatttcccacttgtaattaataagcaacatttagaaaggtattctgaaaatatgtaactatcttgttcctcatcaaatgtttatgcatttatttgcgcacctgcccatcattttctagctctgtcttccttctctattgattagtttgtattcttctgtgaataaaaaagctttatctccccttcctctctccttccttctgttccctttctcctctctccctccctgcctctctttttccttccttcctctttccttttttcttttttaaaagactcagaattattttttacttatgtttttttaaaaaaagtttatttaatagactataatccaacacacctgtcccacttgcttcgaggttctcactacccctccctcctttcctctcacctgtccacctacctagtcacctacccatctgtccccacacatgtatatatttgcacatgcttttttcatatcattcattgtttttgatgcctaaattgtcccagatgtgatctgtgggagtcccctcaggcatccttctttggcacttctgtactttccagcacagggcatgttccaggctcatcttttttattccttgagccagccctggaatcagcctgttctccagggaacatggtgtttagaaaccaagatctggatatgaaatgtgctcattgctcctgtgctgtcgtgccttttaggccctctgagtgaaaaccttacctcttcctgacatggggtgaaagaggaaggaaggaaggaaggagtttgtatatatatatatacaaacacacacgtgtgtatatgtaacatattcatccatccatcttcacaagactacgagttcatactgatacttccaacactcagtgcagtgtaactcccctgcccaacagtgagaggcttggctcccatgatttttaacctatttaccccttactgaaccctagaatatacccaagacattttagaaacaccaatccatagcactgtgaaatgcaaaccctgctaactagagctctctcttgctacacatttctttttattctgctgagataaatttcacctacagctaaacacacacatcttcacacacctgcagaacgcacaccctagtcaaggggcagaatggtcctgagtgctccttcccagttacttgtcaatgagagcaaacacttttctcccacagattaattttgcctgttcttgaacctcgcattggtggagttgaacaggagggaaaggatgtcctccgtccctgcctctttcgcttgatgttatgagatccaggcatgttgttcccacaactgtaggctgtttcttcaccttgctgggcagtgcttcattgtgtggctttctcacactctatttatccaccatgagctggcatggggtggtttccagtttggggttattcaaacatggctgctccaaacatcttggtgacgtcagatggtgtgcagaatgtttctgtagggtgtgcacctgtgggggcaggtgggtatgtgctgagcagattccccaggacttctccgaagtgaccacagcagctgctgtcaaccacccatgttgctggtgctgattgctgcctgtggctctgatttcaccccttcagaaaatgcagagaatggtatcacagacattcatcctccacccacactttaacaaatgctaccattggctgtatttatttttttattgtaaaccccatttgtttcaaaaagctacatgcaaggtattcacattttctccccaagtaaagacgagcctggccacaatggaattagggagcgggggaggaggctgcgttgcaggtaggaccctgacctggagtctgggaccggggaggagggaacaaagaggggagctctctccccaaataattgttctggggggacagagtctgcctgcggcttgcttcaaggacagccatctttcagagagtgtaagggagggtttgatgctgaccaagggagagcacgaataggaacaacatgcttacctccaatttctgaggctttggccctttcacccccatttcaccattggcccttgtggccctgccatgcagaagggaaggggttaccttgtgtacacagtgccacacgctaccgttcctctctctgaatgaggaggggcagggtaacagagttgcctccttctcctgaagcccagtggggcttgcccagcctgctctggaacttgggggcctagacagcaccatcttacctgtctcccatcccctctgcctggtcaccaactgctgccacttgctccctgcccaccctcatgctgcctctcctcccctctgcccttcccaagtctcctgggggaccctcctgtccctctctggggcccagcttcattgcccggccacatggggcctcgagggtgggcatcacgggtcactcatttcacgatcattttccaagccctgctgggagctgcggggtgagggctgctgggtactaggggctcaatggggatgaagacggatgaggagtggctctttgcggtggagagacagaccatgaatgagtgagcactcaaatggcaggcagaagggagtttcgtggggtgagaccgtgggggaaggtggagatttggggagaggtggtgctgtcggtccctgggaagcaggtgtgagctcagcactgggatgaagtgggtacccaggggatagcaccccaagagggggactcggcaagggcgaaggccccagtgtgggcacgagctgccaactgagtagcagggagggtcagagggcaggtgaagagtgaggctagaaggagttgttggctgcttctgggaaggtggaggtggcatttcccaaatactgcctttgcaaaagctggaaagagccgcaccccaggtgaggggcagcctgaggccagggtcggggctgcttccaggtgagcagcagttgtgggaaaggcactgcatacagaggcctgcttctgcctggcagagccgggcagtgagtggggacagcctgatgagctgggtgagggtggctggaggctgagtgggatgccctgactcatacctgagctgagtgtgggtgccgagggctgggcagggtgcaggggaggcgcaggccggcaggagagggaagcgcccttgccataacccctttccactcagagatttgagaagccaaggaagggtagagcctgggagctacccagcccagatcatcatccaccccttcctccagcccagatcaccatctaccccctcccctagcccagatcaccctccacctcctgccccagcccaggttgtcatccacctcctcccctaacccagattaccctccaccccctcccccagcccagatcaccctccaccccctcccccagcccagatcaccctccaccccctcccccagcccagatcaccctccaccccctcccccagcccagatcaccctccaccccctcccccagcccagatcaccctccaccccctcccccagcccagatcaccctccaccccctcccccagcccagatcaccctccaccccctcccccagcccagatcaccctccaccccctcccccagcccagatcaccctccacctcctctcacagcccaggtcaccatccaccccctcccccagcccagatcaccctccatcccctcccccagcccagatcaccctccaccccctccttcagcccagatcaccctccaccccctcccccagcccagatcaccctccaccccctcccccagcccaggtcgtcatccacctcctctcacagcccaggtcaccatccaccccctcccccagcccagatcaccctccaccccctccttcagcccagatcaccctccaccccctcccccagcccagatcaccctccaccccctccctgagcccagatcaccctccaccccctcccccatcccagatcaccctctaccccctctcccagcccaggtcgtcatccacctcctctcacagcccaggtcaccatccaccccctccccgagcccagatcaccctccaccccctcccccagcccagatcaccctccatcccctcccccagcccagatcaccctccaccccctcccccagcccagatcaccctccaccccctcccccagcccagatcaccctccaccccctctcccagcccaggtcgtcatccacctcctgtcacagcccaggtcaccatccaccccctcccccagcccagatgaccctccaccccctcccccagctctgccctgccgcagaggtcagctctgaggctgtggtttctgccctgtttcatgatatcaacaaagcggagagcagcacccccagcccagccccagcacgtgggctttcgcaggtgccctggaactcatgtgaacagtatggaggttcctcaggctgacaaaacagtgtaccacagacggggtggccgaaaacaaccggaactccttttgcagttctgggggtctgacgtccaaaatcagagtgttggcggggccgtgctccctccgaaggctgcggggaggctccttcctgcttcctcccaggttctggtgggggccagcaatcttccccgggccggggtttgcagccgccttgctctagcctctgcctctgttgtggctttcttctctgtgtccaaatttccttcttcctatgagaataccagtcattggatttagggcccatctgaattgaatatgacctcatctcaactaattacatctgtaaaaaccctagctccaaattatgtcagatcacaggtaccagggttaggacttgaacatatctttttttgggaggaagggggcacagttccaccctccactgatggattctgggcgctggtgaccttgaccttaaactcaactgtggttcagatccagccttggccctaagaagtctggaaggggaggccacctgtggtgcacagcatcttagggcgggcacccgggtgtttgtggagcacctaggactcaccagtctctggctgctgcctctaaagcccttctgagcgcacagccgcgaatggagcctcaaccccctgagatcacacaggcctgagacgcagggagttttgggagccagaaccctggttccttagtccctacaacccgaaaccttgagagacgctgaaacttccagccacagtggccccaactccagacatttagaagccgtgtcctaaggcttagccttatcataaggtgcagagacccagggtccacggcataaggaccggagaccacagaaacttaggtgttgagactcaggactttggggccttgaggccacacctccagagtcagaaaccttctttccgaggcctcagcaccttggcgttagagggaaaagtacagaatgctgaactggccaagcatctcccatgtggcctggcctcctcgttcctgagtctgtggctcctcccacggcatcagaaggcccataggtggtttccaacaggggtcctccccaatgtgggcatgccagcctccacctccctggcctggctgccgctgctggccgatcttaacacaatgggccccacatgtccacctgaccccaaaagctccttgagcgagttgggagtgcctcacccacaggtaaaggggctgtcttatccccacaggtgaaggttgagggctggtgaaataggcagaatctctccttccctgttagaagaggggaaataggcagatcctaaaagcaaacacttgtaccatgtttatttggctttattttcatacgcgtattcagcaattatttactaagagcctactatgtgctgagtgctattctaggtcctgggaatatttgagttaacaaaacagacagaaaccctgtactcttggaacttatattctagcggaggaagcagaaattaaacaacacataataagtgttacaatatggaggaaagtgatgagtgaggtggagaggtggagacattgtataggttgtaaggggcctggggacaggagcatgtgtgttcaggggaggcctctgtgattcaacaaaacatttgagtgtaaacttggaggagttgagagaggtcagtgtctgagtgtgcaccaagcagcaaggccagcctgtgcaaaggtcctgtggcagctgggtgcaggaagaacaggggccaggagacttgagcggagtgatgggggcaggagcagaaggcgccacggtcagagggatcatgtaggtggactctgcttcttcctctgagggtagtggggagccatagcagggttttgagcagagggctgacatgatcccatggtgcttctaaaaggatggatctggggccagggtggaagcagggagcatgccgaggaggagtcagaggcgactgtggtggtctagaggagaagccacagggcctcaggtggcgaccgtaggtgacaggctgcagattcagcatctgcttgaagttagagccaataaacaggatttgtagttggtttgaatgtggcatgtgcgagaaagagaagagtcaggaacacaccgaacgtttggcctgggccacttggacgatgaaccggaggaggcgacccaggcaggcagacctgttgggctgtggttgcaacacccaggtggcctgatccagggcggggagcagagggagggcggggagggatataggactggaccattgctgcgggtggcaagagggagggattgggggaggcccagacttgcaagatgggctggctgtctcttctcccaggaggtcaggactgggttgtgggaggcagatggagacctcagggccaacctggtgagggtgagagtctctgggacatgcctgcagaggcacccttgcaacagatacttgggacttggcagtaagggccagacctgaggagcaagtacagaagtcacaggctctggctggtgtttgaggttctgaggttggggacatccagagggaaagccgggggagaggagccagggttgatgggggagagccgggtctggagggggctgctggattcacagcccaagatgtgggagggcatcctgggaagagcatgaggcctcctggagggaggaatttgggtgattttgaatcacagctgccctccatgagtggaagaaggcctggggcgcggcagcaggtcctgtggatggagcggggccgaggggaagcaccagggctggactccttggcttctgttcagaagctgggcgctgaaggcagaacagggcgggatggaggccaggatgggggctgcagggaggccagaggaggaggcaagggcctaaacgcttctctaagtggcattgctcaggatgttgtggccctgggccagtcactcacctgtcaggctgcccttttgtcagggttgaggcagacccaaccctcctgggttgctgggggctggatacgtcgggaagtacaggactccagagaggcccagggatggccagctgcttttcctggtcagagctgtcatccctggggccacaggcagcatccccactggccctgagagtagagggatgggggacaggtgctcacctgcccaggcccacccctcacacctgcacagttcctcaggccagagccaaatgcctcgaagctgctttctttcctttgtcttttcttttttttccttccttctctccctctttcattcctttcctttcatttcttcccccttccttccttcctccctgtcttctcttcttttcccttcccttttggttgagcttaaagccaatgaaagaggtcagactgggggttggagggatggggataaaggaaggaggtagggaggggaggggaggggagggaagaaaagaaccttatttcccagcagagctgagcatcagtaagcctctgatgtcgcacagtgagttggagggacacaagcactcggccctatgccccacccaccccaggagctgtgggtggctttcagcaccgcccctgccatggcacctcgcagtggcgtccgcagcatcaggggctacaggtagcttcactagggattggggcttcaatatatgaattttaggggacacaattctacccatagggtcatcattgagtatttgtgagtgttggggtacaagctggggtgctgtaggatcgttccaatcaactcagatgcctgggacactgctgaggggctgcctctgcagctggcctttcctgagccctcgggagggactgagcctgctcctttgtccccagcatgaccctgagcagccttgttggggtgatgaggggtggaatccaggcctggagttggggcttgagtgcaggggccatgcttcctttgagcccctgttcctggcatacaagggggtgcaccctagttttaatgccagctgtgccaggcatcccttagcagtggccaccaggggcaattgtacgtgcagtgtcgtggggaaaccccgggacatggagataggacctgtgtccttcctggagaaaccactaagccattgtgaatgtcaagtctgcagggttagccccatttcccattgcagaaactgaggctcaccctaggtcatggcagcctgctgcaggactaaggtttccttcaccttcagccgggctgtctctgagcctggctcacctcctcaccccactgtgctgagatacatccggggctggctctcccagcacagagaagaagccatgtcacctttactgacaagtacttttcttatagaagcaggtcccaaaaggaccccgtgtgctcagttctgggggctggaagtcctagatcaaggtatgggcagagttggttccttccgaggctgtgaaagcagttgcatcctccttgtaactccctgcagggaggttactgggttgctgaggggaagggtgcctaggccctggtgtctgagagtggatcatgtcatcctgagcatcccctgcctgtgtgagctgacttctgcctccgtgccttgccttgtgtgtaaagagaggatcctactagtgcctgacaagggtcacaagttagaacatccggctaagtccctggcacatggtaaaccctcaatatagtgtccattttccagatgggaacactgaggcttagggaagttcagagccagggttgacctgaatttacacttccgatgaagccagtatgtgcacttggatcatagtagatccatcatttctatttggatttttcttctattctggaaagggttctgttttgcagggagagatagatatgcaactcacaaataagtccatccatgcattgggactgtggacctcaaaacttggctgccagagcacgggggtcctccaggctcagcagccatggggacaggctcggggcaggaccccgaggaggctgctgctcttggaagacggagccgggcatttcgaaactggaattatgaaacaaactacgacccaggatggaacggagcctgtgcatcccaggatgtcccacagatgggagcattctgcatgtgcgttttgggttactgagagaagtgaaacactgcagatacggcagaggtgtttctcccctccctccgcccctagatgtggccttcacacgcaggctgatgcgctcccttcccatccacgcctgctcggttttgccacatatgccgctgtgctgccggccttgaatgtgtatgagcggctcgtgctggggtcagcggaggctcgctcttcttcaccctgtgttacgtccaggaaacacatccctgtacgtaggcgagagtccactgtgggaagaaccagcagtgtggctgctttctttctgaggcacagttgtgtttcgtgccccccactgtcctgctgctccgggccctgtggcgtgcaagcaagcagggagagtggccggagtgtggcgcctggaggtggaactgcggcgcagggcaaggggcatctcccacgtcacccagtgtggccaaggcgtgcttagggccctgcgccggccaggcacagagagagatgctggactctaggttcctgtagtccaaggaagggttttgcctgcctgtcttcctcccttccttcctcttcattccctccctccttcattccttctcttctcccctccctcgtctccttccctccctctctcccttccttcttccatgtctcccttcctttcctttccatctccctccctcccttcctctcttccttccttccttcctccctccctttctctaccctcccttgcttccttcctctcctttccctctcttcctctatcccttccttccttccttccttccttccttatttcttgcctgccttcctgacttcctccgtccctgccttcctccttcccttccttcctctctctgccttcctctcccctcccttcttcctccctcccttccgtacttcctctcccctccctccctcttttcctttctctcccctccatcccgccctccctcccttcctcttttccctccctccctccctccctttctctcttttccctctcttcctccctccctccctcccttcctccctctcttcctccctccctccctccctccctccctccctccctgcctccctccctccctccctccctccctcttttccctctctccctcccttcctgtcttttccctctctccctcccttcctcttttccctctcttcctccctccctccctcccttcctccctctcttcctccctccctccctccctccctccctcccttcctccctccctccctcccttcctccctcccttcctccctcccttcctccctccctccctccctcccttcctcttttccctctctccctcccttcctcttttccctctcttcctccctccctccctccctcccttcctccctctcttcctccctccctccctccctccctccctccctccctccctccctccctccctcccttcctccctcccttcctccctcccttcctcccctttcttcccttctctcttccttcccttctcccttccttcttccctcctttccttccttcctttctctcccctccctccctccctcccagcaccttcacaatagcccaggatggaacgtacagactgaccaggaaacaaacccttgcttttcttcccacctatgggtgaatttgggcaagttaccacgtgacgttgtgcctctggtctccctgcctgtgagatggggatgacacttcctgcctgacagggcttctgcgacccagcaccaggttcaggatgcacctggcccttggtagatgctgggggctgccatgtgtttgttcatggattcacgttgggtgggcttggctctgtgcaaggtcctccggagcccccacatcctcctcttccatgttggccctggagggaagcggcttctcagaagacagagtctgtgctgtctccagccatctttggcctcggaaatcgctccagtgttcccggaatccaatggcatccccactagccagacatttcttcatgcctagggttcccaggagccaccccgccctcccagagaggttcatgaggaaggtacttggggctggcgggagaggtgggagctggggagacatctggaaaattctcgatccttgaaattagttaaacaaataatgtttgctttcctgcttaccctccaacaacctgaagaatggggcccctgggacacgtggggctgggcgttttcctgtgtcttgtcagggtttctccagaaaggagggtcccaggatggatgtgggcaaggcccttggtgccttcgggacctgggctctgcagactgcatgtggcttcaggcaggcagcccccagtgcctcagcctcagtgtcctcatctgtgtctggggtactttctggcagggtctttaaggaccccctgtctgtgactcatgagctctgcctggtggtgacaggctctctggagtgacacggtgtgtgaccctctaggctgtgggaggaattaaaggagccagggaaatcatcacttggctgccaagctggagggggcagctgcagcccctacacctgctctccagccctttcttgggcccccaggtcctccagaagttgtcaaccatcacggttgagtgtcaggcgaggccccatcatctttgtgtctgctcagcagcttctgggtaactgtgacccacatgccaatgcccccattccaggtcaggctcccaaccttgccccgcaggactcaccacagctgtaggtgctgtgtgtaaggatgcatccgtgccttctctcacacacatatgttccccagctgtccagggctctcctgccctgagctccagcacctgtatgaggcctggcacatgggacatgtacatccgcagcagactgaatgaatctgagtgagtgaatgagggagtgagtgcatgaatgagtgactgaatgaatgagtgagagagtgagtgagtaaatgagagagtgaatgagggaatgaatgaatgagggaaggaatgaggaatgagtgtgtgaatgagtgagtgaatgagtgaatggatgggagagtgagtgaacgcatgagtgactgagtgggtgaatgagtgagggagtgaatgaatgaatgaggaagtgagggaatgagtgagtaaatgagtgagtggatgggagagtgagtgaatgcatgagtgactgagtgggtgaatgagggagtgaatgaatgaggaagtgagggaatgagtgagtgaatgagtgagtgaataagtgaatggatgggagagtgagtgaatgcatgagtgactgagtgagtgaatgagtgagtgaatgaacgaatgagtgagtgagggagtgaaagaatgagtgagtgaatcagcaagcaagtgaataaatgcgtgaatgaatgcatgatggagtgagtgagtgaatgaatgaataaatgagtaagtgaatgaatgaagtggcctggggcctgggcctaggtcttcagcagcagcagcagcagcggcagtggggcctggtctctgggagcccctgccacaccccagctgggagccccgaggccaagccactgccctcccttggcctcagtttcccatcaagggatgagaaatggtttccagattccaccctcttagcagctggcagatatccacgaggcacacctctttgtcagcccagtgctgggtgctgggaatacccagctctcagacctgtccctactcctgaagagtgttcagtggtgacatgggggaccagccttccacacacctgacatgcccccactgggccattcacgtgctgtgggcacacagggcagggcaagccttagtggcatgcagtctgcccatgggcacaggtggggttgagaccctcaactgccaccatagggattctgggctttgccactggggtggtgggggggctatagaagtgttcagagcaggagtgtgccaggctggttttgtgagtcccagaccccactggtgcaggattgcagaggagtgagggccagactgaagcggggagctcagagaggatgctgaagcccctccaggcttctcagggccaaggctgggtctgaacattccctgacacctggcaggcagcaccttcctcctcccaggacaggagcgagatcccctgaggtgcttgcgcgagtgcacatttggccaaggcaggaagtgcccttcacagtgtgacccaggccctattctgtgccttctctccccagctgcccggctcctcctgctctgcacagccttcccctcaccaccatgaatgttcctccttgtgccacacacccgataccactgacccacagctcccactctgccttccagatggaaggctcttctttttttttttttgagatggagacttgctctgtcacccaggctggagtgcagtggcacgatcttggctcactgcaacctctgcctcctatgttcaggcaattcgcctgcctcagcctcctgagtggctgggattacaggcatatgccaccatgcctgggtaatttttgtattttttagtagagacagagtttcaccacattggccaggctggtctctaactcctgacctcaggtgatccacctgccttggcctcccaaagtgctgggattacaggcatgagccactgtgctcggcctggaaggttcttctgttccccctcttttctgctggccaaagtctatgatgcttttccgttttcacctcaaacacacatcacccccaactgcatgcagttttccgggagccctgccccagccttctgtaagctatgtgctctcctgctgactcctggaccagaggatctggacccacgagggcacgggcaatgtccgggcctctctctagccacatgcccagcagctggcttaccactctgtgcctcagtttctgcctctgtagaatatgtcagtaaaaggactcagctcctaggattgccggaaagatgaggtgagcagcgtccagcagagcgtaagagcttggacgtgttagtgtcaggcgccatgttggggtcaggctccgtgttggggtcaggtgctgtgttggggtcaggtgctgtgttggggtcaggtgccgtgttggggtcaggcgctgtgttggggtcaggtgctgtgttgaggtcaggagctgtgtgttggggtcaggtgctgtgtgttggggtcaggtgctgtgtgttggggtcaggctccgtgttggggtcaggcgccgtgttggggtcaggctccatgttggggtcaggtgctgtgtgttggggtcaggagctgtgtgttggggtcacgtgctgtgttggggtcaggcactgtgttgggttcaggagctgtgtgttggggtcaggtgctgtgtgttggggtcaggtgctgtgttggggtcaggctctgtgttggggtcaggctccgtgttggggtcaggcgctgtgttggggttaggagctgtgtgttggggtcaggtgctgtgttggggtcaggcactgtgttggggtcaggagctgtgtgttggggtcaggtgctgtgtgttggggtcaggcactgtgttggggtcaggcactgtgctggggtcaggagctgtgtgttggggtcaggcactgtgttggggtcaggagctgtgtgttggggtcaggagctgtgtgttggggtcaggtgctgtgttggggtcaggctccgtgttggggtcaggctccgtcttggggtcaggctccatgttagtgtcatgcgccacgttagggtcaggcactgtgttggggtcaggtgctgtgtgttggggtcagctgctgtgttggggtcaggcactgtgttggggtcaggagctgtgtgttggggtcaggtgctgtgttggggtcaggcactgtgttggggtcaggagctgtgtgttgggttcaggtgctgtgttggggtcaggcactgtgttggggtcaggcactgtgttggggtcaggagctgtgtgttggggtcaggagctgtgtgttggggtcaggtgctgtgtgttggggtcaggagctgtgtgttagggtcaggtgctgtgttggggccaggcactgtgttggggtcaggagctgtgtgttggggtcaggtgctgtgtgttggggtcaggaggtgtgtgttgggttcaggtgctgtgttggggtcaggcactgtgttggggtcaggagctgtgtgttggggtcaggtgctgtgtgttggggtcaggtgctgtgtgttggggtcaggagctctgtgttagggtcaggtgctgtgttggggccaggcactgtgttggggtcaggagctgtgtgttggggtcaggtgctgtgtgttggggtcaggtgctgtgttggggtcaggcactgtgttggggtcaggagctgtgtgttggggtcaggtgctgtgtgttggggtcaggcgctgtgttggggtcaggtgctgtgtgttggggtcaggtgctgtgtgttggggtcaggtgctgtgtgttggggtcaggctctgtgttggggtcaggctccgtgttggggtcaggcgctgtgttggggttaggagctgtgtgttggggtcaggtgctgtgttggggtcaggcactgtgttggggtcaggagctgtgtgttggggtcaggtgctgtgtgttggggtcaggtgctgtgttggggtcaggctccgtgttggagtcaggctccgtgttagtgtaatgcgccacgttagggtcaggcagtgtgttggggtcaggtgctgtgtgttggggtcagatgctgtgttggggtcagctgctgtgttggggtcaggcactgtgttggggtcaggagctgtgtgttggggtcaggtgctgtgttggggtcaggcactgtgtgttggggtcaggtgctgtgtgttggggtcaggcactgtgttggggtcaggctctgtgttggggtcaggctccgtgttggggtcaggcgctatgttggggtcaggagctgtgtgttggggtcaggtgctgtgttggggtcaggcactgtgttggggtcagtgctgtgtgttggggtctggtgctgtgttggggtcaggcactgtgttggggtctggtgctgtgtgttggggtcaggtgctgtgttggggtcaggtgctgtgtgttggggtcaggtgctgtgttggggtcaggcactgtgttggggtcaggtgctgtgtgttggggtcaggagctgtgtgttggggtcaggtgctgtattggggtcaggctccgtgttagtgtcatgcgccacgttagggtcaggcagtgtgttggggtcaggtgctgtgtgttggggtcagatgctgtgttggggtcagctgctgtgttggggtcaggcactgtgttggggtcaggagctgtgtgttggggtcaggtgctgtgttgcggtcaggcactgtgtgttggggtcaggtgctgtgtgttggggtcaggcactgtgttggggtcaggctctgtgttggggtcaggctccgtgttggggtcaggcgctgtgttggggtcaggcactgtgtgttggggtcaggtgctgtgtgttggggtcaggcactgtgttggggtcaggctctgtgttggggtcaggctccgtgttggggtcaggcgctatgttggggtcaggagctgtgtgttggggtcaggtgctgtgttggggtcaggcactgtgttggggtcagtgctgtgtgttggggtcaggagctgtgtgttggggtcaggtgctgtattggggtcaggctccgtgttggggtcaggctccgtgttggggtcagcctccgtgttagtgtcatgcgccacgttagggtcaggcactgtgttggggtcaggagctgtgtgttggggtcaggtgctgtgtgttggggtcaggctctgtgttggggtcaggcgccgtgttggggtcaggcttcgtgttggggtcaggctccgtgttggggtcaggtgctgtgtttgggtcaggagctttgttggggtcaggcaccatcttggggtcaggctccgtcttggggtcaggctccgtgttagtgtcatgagccactttagggtcagacgcagtgttagggtcaggctctgtgttggggtcatgctctgtactgggttcagattctgtgttagcgtcacatgctgtgctggtatcaggcgccgggttagcatcagatgctgtgttagtccactcaggctgccaaaacaaaatacctgggactaggggcttaaacaagagtaattccttttctcacagttctggaggctgaaagcttgagaccaaggtgtaggcagggttggtttctcctgaggcctccctccccggcttgcagatggccgctatctccctgtgtcctcacgtggtcgtccctctatgtgtctgtttcctgatctcctcttcttataaggacatcagtccagttggactagggggccacccaaatgtcctcatttgaccttagttactttaaatgtcctagttccaatgacagtcacatcaggtattgggcttcaacacaggcatttcaggtggacacaattctgcccatgacaggagctcactggtgtttgtgatgtgaatgaatgaatgaatgaatgaatgaaattatgcgaatgaggcatttcccttctgctgagggaaatcacagccaccaaagagttggtctctgtttcacattcaggacaagctgcccatccacctttacatgcatttttttcctctgtttcccacccataagcctgaagggtgagagggggggggcctccttttgaggacagaaacataaaatggtccgggcactgttgtccctccccacctgaggacaacaatggtgtttggagcttgggggatgcttggagaagaaggtggcttctgtgaccagcagctctgtccccacctgggagagagggtaacgcaggaaggggctgtcaagagcaaacccttggatttttgctctgggcacagaggagatctgaacagagggaactgctgctcagtggctttgagccagaccttgggtgcctgctgcttgtccccctgtggcaggggtaggggggtggagggtcatctctcgacgatcagtgtggagggaaggatcacaggctttggggcctgcagaattccaccccaccccaccctaccctggcatttagaagtggttggccctgggcaaggcttcactgctccacgctccatttcacccctggttgggtgcacgcagccacctccagggttgtggtgaggggtgagtcgacgaggtcagggtgaaggccgagcctgacactgggcatggtgctggcagagacctttctgtccatccctgctccttgacattccagaattcctcaggacccagcacacagtaggtgtcaaaaatgcatgttgattgactgacatcagtcaaccagagtgaacagcacacgacagcccccggacagattccccgccaccagttagcttttcccaaggcatattctgtcttcccagccgccatgcactggacctgaatcccagcctgtcatctccatgtagatggcctcagtgctgggtgaggtgactttatccctgaaaggacatgcagccaggcctggaggcagaggccaggactgcaggtggggagggacaacagcacctgggccccgagtggcttttggccagggagccgcgtgccccagtgaacatcgcaagctggcaggtgtgagctgcagccagagggcctggctcacaccagggagcgtgccccagtgaacactgcaagctgacaggtgtgagccgcagccagagggcctggttcacaccagggagcgtgccccagtgaacatcacaaagctgacaggtgtgagctgcggtcagagggcctggttcacaccagggagtgtgccctagtgagcattgcaagctgacaggtataagccgtggccagagggcctggttcacaccagggagcatgccccagtgaacactgcaagctgacaggtgtgagctgtggccagagggcctggttcacaccaggaacagcatcaggggtgttttccttttgtgtctctgcctgagctgctctgcttcatggcctctggggaagaggccagaaagggaaactggaaggccctgggggttttagttttttgagctgacacagctgcctgttgggcctctggagaggtcaggagggctgcagggcgggggtgtccacaccactagcccgagaggctgcggggcagggacgtccacactgttagcccgagaggccgtagggcaggggcatttggtctgcagctcctgggatgtcctggttaccccaaaacaaaactgcccattgacctggttgagtgggtgcccaactcccctcaggggtgccataggtgacacagtacttctgcgaaaagtttgagggagggaagggtcttccggaaagagggaagatcttgtgggcagcaccgaggcctgggaaggcattgctgagtcctcctgtggggcggggggaggcggggctggcagggaagtttgacgccagaggctggcacaggctgtaggttggaggcagggagacggtactcactactgtaggtactagggagacactgagggttgttgagcagggggagggctgtgcctcagcggagcagggctgggtgcaggtctggtcttgcgtgttaatgctagtagttttccagctgtgctcccctgagtcctttgggggcccctgagcaaagaaggatgtggggaaaccgtggagaattcccccatggtccccattccccaaaccaagcagcctgacattcatgcttcactcctacatagccctttcaggttagacttcattttggacaaaacttcctgctgcttaaaacttgttaaacacctttgcctaatgagattgatgtgggatgatctcgctttcatttatttgctcatcaaacttgacctgagtgtcctttctctagggcctaggctggacaggagactcaggtgaccgagacaaggtcccagccaggaggagcccactgtcctgtgggacagcctggggctcaggccaccccaagggggtcccgggcaccatagcgggagcagtggtggtgtccccaggggtcaggggagtcttcttggtggaggcaatgcttaatggagccctaaggaatgagcagaagttggcctttgggaccaggagaaaagggtataactggctgtgggaccatgtgtgcaaaggcttctctgctggctgcggggactgggcttgggcctggtggagtgtgggggccggcagggggtgcatggaggggtcagagagaagcctgctgggctcctaaggcgcgtggcaaaggccacgtcctccccgatattgctcccctgggctgggggcacactcttctgtgtgcgcaaaggtgtggccctgaggggtgcagtgaagaccgtgtggctttggactcacccagccacacagagctcagatccgagccctccctgccccaccatgggacgctggcgagtctctccacccttctccgagtctctgtttcctcaactatagaagagggaggatcctttgcacccctaagtattgctatggagaaggcatctctcccaaccccaagcatatggcaggccttgtactagggagacatgaggtgggggtcaggcacagaaaggcggtggtgttgaggctgcaggcttgagcccagctgctgagtttgagcccctgtctggctcagtttccttatctgtaaaatgggctttaccattcagttcctctctcccaggtggacgtgagagttgaataaggtgacacccatgatggccgggccccatggtggttagtgaagcccatgatgatgatgccacgatgcctggccccgggaagtgaggcagccgcctctcagagctctgaattccccgggcatctgtcctggcccagcctggggtgtccaggccactggtctctctggtctcagagtgctcaggaggacttcccagcatggcctcaagtgtcccatctccagacaagcctctccatggccagccctgctcccatcaccctctgggatgtcgcctggttgggttcaggagccttgagggtcctgtgaagccagcctggtcacattgagggcattagccagggccatccactttggggagaagtacccgggcaggtggcttctgcccccaattggtagggagggagagaggcaaggagcagctgggagcattggcagagtgggtggtgggggagaccacgtccttcatgtcatccagggccacccctgcagagcccagtggccctgagcatccaatctggtaggcgaggggcatttagggtaactgagctgctgccggggcctggcgctcctctaccttgtcaggtgacccagcagtccctccccctgcatggtgcccagtgctatttgagggtctgagccagccaatgggttgagagtacccccgctccccacccagcgtgccagctagtagaatcctgggcgggcccaagggaaatgaggcagtggtaccttggggtcctcacactgagcgatgccatgccctaagccccagaggacatggtccccgatgctgccatctttctgatggggcccacctgggcactaaccagccaaccccagtcggtggccaacgcagcttccacgggcccctgcacacttctaaggtccagacattcggggtgccagactcccccagcttcagaacagctcggtggtcaaaaggcagcctggagttgcagcctcagtgaattccaacgtacccccacagctttcccaagcccaccttgcgccattgtgtctagagccgctccaaggccctctggccgcttagaccccatggtgcatttccatgactggagtggcatccgtgtctgtgggaacagctgcaggcatgtcggaattgcatgccgagagctgtgtaatcgagatttggtgacattagtttcttgtaggtgggaatgtggagggaaagggaataggacctggctggatattcagctcttgggagtaactcaacacgctccctaatcctgggtgtcccatgaggtcacttttcagcggtcacgtgacagctcgatgttgcattttcacatctgtggccgtgaccctgccgtgaactcacagtcgcctcctgaagcctgggccgtgcatcggctacacacggccaagctcgcagcttgaatttttcatgggaccacactcaacacaggcacccggtttccatcgaggatttcatttctcccccctctctttccatcatcctcgtgctgctccttgccacctgctgcccggggagtgtcagaaatgccaggctgcaggcagacctgaagcttgctggaagcttcttcaagatgccctgccacaaacatcagaggacattagagaggaggccatgtcaggactgaggatgcggtgattcgatcagtgatgagctctctccccaaattaaattattcatcatttcctggtccttaataaaataattactgccttcgctctttccctctgccgtcacaggacttgcttccatctctgaacgtgaaagatgctgtgggggcgtctgcagcccctggagctggagcccccgccctccttcccctctgcctttatcttcctcccccaaagtcccgcctcaccagcagggggatggccgagcttccagcttgacctctgggctgtcagcctggccgcgccaaggccgcctctgcatggtggctgcacactgcgtgtgatcagtggggaaacctgtagcacccccgcgagcaacatgtgtacatggactcacgccgcactgtgctgggattttcatgcacgtgacaaaatcacatcccacacagaaaatttccaaggacataatgagaaatgaagtggcactgtagcatgtttgcatgatccgaggagcgtagcagcagcctcgctgctggggtgacagagaaaacccagcgaggagctctctccccggcccttccacggtctgcagccatcctcaggatatagcccagaggcttggacagggcgttctgggtgcctcacctctgaccccttcttagctccccaacccctgctgcccaaaatatggcctgggaacccacacatcaagccccaccccacatctgcccacctgtcatctgcatattaacaagacccctggagcttccaggcacacctgggaggtgctgtcccgcaggcttcagtgcctctgctgtcctgcaggcttcagtgcctctgctgtcccacggcagctggacacagctggcatctgaaaggcaccgcatcaggctcacctgtctctgtgcccaaagttctaaggaattattggaactgtcaagagaagccacagtgcaagtgagtgtaagggagaggatgcccagagagccacccagagtgccttggagcccggcctgtgtgcttcgctcttccctgggctccgaggtggggagacgagctgacatttgttaaggctgtgctgggcgccagctctcctgcccggtgcttcacgcagggacaggtggatggggagactttggagtcagcctgggactttaatcccaaatgtctcacctgtgagcgggagatgtgagcaaatcacgtaccttcatgagcctcagcttgttcatctatgtaatggggcaaagggcagcacgaaggatctaaagacgggcttcgggaggctgggagtgggactaagaactttggcctttgttttatgctttttataagcctatcagtaggccaggggtccctgatgtgcagaagcccagataaaagcaggcagtgccctcagtgtactccagagacgttggctctaaagcctggattcctcccctcctggtgcacctggaggcgactcacagtccaagcatgcgtggcactgtcatctgtttccagagtgccctctgctgtcagagtgaccttttccagggatggagcctcttgttcatcctggcgacctcagtccctggctctgggtctggcacgcaggaggagctaagtgaataaaggaggccagctgggccccagcccctgtgcacggaagaagccggtgcacacttgcagagtgaatgaataacaacagcatgttgtgagcactcactatctgctgtcacggtgcactcgccagagggagcgctcacaacatgctattatcatttcccagtgagttccaaaaaacaaataaagaaatgagccactcttgccaattccccatcccgtgtgccaggcttgccaatatggggactgaggagtgcctgtttgagatcactagccaccacacctccctggtctctgccaccgtatctcagctcccagtgtgacaacagccccacaaaggcccctccagttcagtgttcttgttatcatcctcattgtacaggtgaggaaactgagtcactgtctagagcctagggataaaggggcagtgggccagggagcctggccccgaagcctggtgctgaccactctgttgagaagcctcctgaatgaatgactacgggattaagagggggcactgctggatttggtccatgttataggatttgctgcacagcccgttactcagaaaatggggctgtggtatcagacccggctttgaaactggacatagtccagctgtgtgaccttggggataggaagggaatggttatttgacttccctgaagcttcactcacatattctgaaaaggggatttaaaaaggagactccagcgcatagtaggtacttagtaaatgtttccttcccagagtggaggtgtgagttttatttgttgaaaatccctgggggtgggggcgcagaagctctcgactccagggcctccaggaacagacccccatccttggaaaaggccttatccttctccacgtctctgttaaaacaatcaacgctggaggctggcaaagcaatttgttgcttaactttagtggaaaaataagatcagtgatttgtgcttgctgaatttggaaatagtagggaggaaagttgggcgggcttggggagacggtggtgccactctcctgcaccgctctggagcaccgcgccgtgcatactaacggccctgattagtgtttcagcaggagccctgcgccgcctacatactgatgcgtgccggactggtgtggaattggtttcccagctgtcacactgggaaccaagatacagtagcagagactggggaggtgcggaggctggtgatttcaaacaggcacccctgagtccccacactgatgagtctgggacgttggatcgagaattggcacgagtggctcctctccttttttggtttttggaactgactgtgaacccaagtattcattaactcattcagtcaggaagcgtgtgttgagcttctacactgggctggcagtgagctaagagctggatgccgcagtggactgaacacacctggtcagcctggaactttccactgtagaggaacaaaatgggccaggcagcttcaccatcaggcgatgtcacagtgctgggattcaacctgcagaacccacccaactacccatgagtgagcccctaactctagctggagaagccagtagaagtctccatggaggtggaacaggtgggctcttttgtgatggacattgagggatgaatagaagttcaccagggggaaaaagaatgcactctaggagaggctgcccgagctctggatgccctgagggaggggctgtggtctattcagggaaaagggagccgcagcctgtggagggctggtgggagcggtggttggcagatgcagggcctggaatgccacactaactagcttggactgagccccgaggggaagtgtgctgcagagggatttgcagcagagaagggctatgtggttaggtttgtagtctagaacggtgtgtgttgcatcaagaatggattattttagggtgagagtttgtacccattcaaaggtaggactaggggctgctgtacttttggggatcccaaaaaatggtgtactctgaccatttccattgggatcaatgacaaataaaaaacagaaagctcaccttgaatttcctccatagtccagactttctgaacttccggcactatggaatgtacttgtttgtgctgggcatcgggatagtgcctagcacagaggaggggcctgagaaatgcagatggggaatgggagaggtgggtgatgctgccttccttctaaaagccggcgcctccggccatgggtcccggcagcacagcccggcctccacggcggctcctcgctgcagcctgaggccacgtggtgtcctgacctttgccctaagtgctgggggttctgcccaggttatgtcacctctctagaaaatgaggatgacaaagcaccccccttgcagggtttttgtggtgaagtgaggacagtattagcttctcatgggtgaatgacacccggggccgctgggcgaaagaaggcccaggatgctctgctggggccaggggatgggcgcggaccaggcagccccgagcaggaggcctctgctccatggcaacattctcctgcatttagccctcaggagctgccagggcatgaatatttaatctcagcggttgccatttgtctttgcactgttaatactgcttttcctttttaatttagcagaagggcacacatcttgcgagtttctttatatgtaaaatatgtggtattcgggctttatccaagctgctgtgggagctggctgggaggggagggtgagtgggcttttcccggtggctggaggtgacaggcttccctgtgcaaggcgccagggtgggcacaggcactgtgaggagccaggagctggagccatctcctttctgctgtttttggtgtttatagtaatgtgtgtccccctctccaggggcttgtgctggagatatgtgtgcacttttcttttaagttcgttttttctcctttataaagatacgtagacattctagaacatgtagaaaatattgaaaagaaaattcatacatggtcctactcaccaaggacaataaggcttccccgcttctaatagttacacatgtacaagaggttgatatgtaatctccatcaagatggtgaatagaacgcaagcccagacaaaggcatggcttattagccgctgctgttttttagtggggggctaagtgtttacaggagtaaaccatgatgaccctgggaggtgggttctctcatcattcccgttttgcagatgaggaaacagaggtgcagacaggccaaggatccatgcaaggcagaaggcctggggcaggggcagggccagggtgggaacccagggctccaggttgatagaaattttttattaattgccccaaatctcacagctcgaagactattgctatccacatcatgggtattcatttatccagattttttccacacaaagggatatgaatgtgcaagcattctctgagtggtttctgctggaacaaacgtccccaaaccaaaaggtgtttcctggtcttgtctcagtctgatgagaacttcagggcaggtgggggtgagagtacatctggttcacgcccctgcagtcaatcaggggcccaggctcctgcctccttgtggctctgccctcctccagatctaggagacaaggagaggctggcgggattccacgggggagggtgttatgggctggtccaccatggcacccaggactctgcccacattccgctggccagagctcagtcacgtggccacgccccactcagaggaggctgggaaatgtggtcttggtatgggggcagggggtgcatggagagaagcagtttaatgagccagttctggagactgtgtcatctctaacacaggcacacactcacctggcctcacgtccataccccattctccctctggctgcagtggaaacccatggaaaggggcagcctggaaacacggggtcctgtaggaggtgggcaccttggcccaggcagtagctggtgaggactgagcccggggagcagggaatacaggtgggaggcagaaccagtgggtggcccactacatacagggtgtggaagacggcaaatccaggcagactcccagctttctggctgggcgattccctaagtggttccagaatcggcccaggggtgctgggaggcataggcacttgggaggtcctggaacctggttggacgctgtcacttgacctctatttgccatgtgcttggacagggctgggatggaaatggacctaaatgccaggggaggcaccctgctgcctttctctttggagatgggtggggcttgtatgtatgcaggtggctcagtggctctgtggctctttggcttggagcacacagcccacacagaggcagagtgtttggagggaagacactgaagcattgtgtggttttgtctcagcatctaaaactcccaccacggtccagcctggcgtccccccaggcgtttggcagctgcagttttcctggccagagcatgccacaagtggtcccctggatgtccaggaggcagcaaggcctgtgtgctgctgttggaagctgccagacatgggcgaatgacgtgtcatccacagcccccacgctgctgcctttgtccgtatccactgtggccaggacagcagcagagagtggaagggtccctagggctcccactcagatctgctgtcctttcttcttggggccctgggatgaggagctcaccctggggccttcggttggcctctgggttgggtgatcaaggaggtggcgactgccaggtcaccttgtcctcacagctctcatcatcactctggcctccgagtcaagtgacatctcattcataaggtgacagaagtcagagggcagctgggctggagccacccagctcctgagtgtgggcctgggcagtctatgccacttggaggctgcctgctgctcacagctcagcggggcctgcactaagcttcagaggcctcctgaatcttgaaggagccagggctccggctccctcagccctaggctccagtcccagctctggcctctgggggagatgccacccagctcttggtctcagcggccactgccacaaaatgaggggctgcattccaaagtactctttagccctggctgctgtggctcccggagccggtccccgcacaagggttcctctgcagctttcctgggtgcttttctacatctcaggaatttgttctgctggtgtgtccctgggaggctcaagccccttggcctctttatcacaggagatagctgccaggttgggtttgagtgggctcctgcccaaggggctggctctgtcctcctggcttcagaagcaagatctgtacctttctgccccatggagccacaccgaggtatgaggatggcagcgggttctccctcagtgcccccagctcccgcatctgtttccatctcaactgtcccctgcaaggcacagttgttctctgcccctacatcactctgccaccctcttctgagcaggctctggttctccttgttccccctaagtactgattacaaggcttctgtgtgaatagccccaggtctaagtgggactccaccgtcctccttccaggtatggagctaccactattaacatcgtcatgggtcgcaaccttgttgatggtgactgagtcctgcagcacccgaagcctcgtatgcatggctgtcactcagctgctcccatccccctcacgctatgtctccatcctcgcagtactcatgggatcagcccagggcctggaacatggcagttgcctgggactatctatttgagaagaatacactgaaaaaagatgtgtgcatagcgtcgaggatgggggttactttccttctgtgtaacagccaagaagcctcatggttctgggtgcagtgggggcacttggaaaggtttgttgaatgcatcaacgcgtagagtgaatgaataagcgttcttgtgctttcacagtgcaacagcaaggcctggcatggcgcttcacccagcttcatcttgatcacttgaaaggcactctctagtcccagctgcttattttggatcctaaccatctcttccatctgttgacagattcttattgtcagcattgtttgggggagattaggtttttgaaaggtgaggatgctctctgacattcgggggtttgggtctggacgttgcatttgatcttccccttcctatccaaaacgccgtatctgttgtcaggcagctctgtgtttctctccctgctccacatctggtggccgtgtgaccttggacaagtcacttaacctctctgaactgcaatgtgctcatttgtaaaataggaaaaatgaacagcactactctgaagagttgttgtgagggtagaaatgaggaacactcctaaagtgcttcacacagagcctgacaaggagttaagacatgatggtgattatagtgaggctggctgtgatggtggtggtggtgatggtgctgatagtggtcatggtggtgatgatgatgatggtggtgatggtcctggtgatggtggtgatgtcgatgatggtggtggtggtgatgatgctgttgatggcggtggtgatagtgatgatggtgatggaggtgatggtaatggtggtgttggtgatgatgatgatgatgatgatgacaatgatgtacctcatagcaagggactggaaaatagaacgcagagacagtgctcacaaaagttctttctccccgaaattcagtgctttgggaatgcattggttgcttctgtgcaaaccctaatcctaagctgtggttggaatgtgcggttcatgtatcttccctcaggctccctggcaggttaagagcaggaggtgatgtatcagaacctccaaaaggagccctgtttatccaggcagagcctgctctcaaaatgcctgcctgagtctgtagcttccttccagccccactgaggcttccaagtctcttgccaacagatccccagtcctagctgcacatgagtctcctgggcaggcctacagattatgaagcctggaccctgcctccagagattctgattaaattggattggagtggagctcctgtgtctgcttaaaaagctccccaggtgattccaatctgcagccaaggctgagaacccctgcaaagaatttctttccttctcattgcagggctgtttaaaaacaatcactgcctggcatctcatggggaggcgaacaggcttctgagatcagtggcacagagagtgggctcctcagtttgtcatcagagacaggaagacaattgttatcaaacaatgggtcttcatgctcagcactcttaaaaagaaagaagagtggaggccagaggccacaaagatgtactgaagtcacagggccagcaggtccagtgtgtcctccagggaagttcatggccaagggaaaacgctcctccctcttgagcattttctaataaatgaggaaagggggcccagattgtttcattgaactgtccagggtcaaacagtgagttaatatatctatccagtcatccatccatcctcccatcctcccatccctcccatccatcctctcatcctcccatccctcggtccatccacccatccatcctcccatcctcccatcctcccatcctgccatcctcccgtcctcccttccatccatctacatattctcccaccttcccatccacccacacatccatcctctcacttatcgatccatccatccatccttccatccatccatctatccttccatccatccatccagccatccagccatcctcccattatttcactcatccattcatccaggtgggatagggatggacagctgcatgggttcttcatggaggctttaactgccaggcaagaggttggctctgccttgtggccaaggagacccatgtgagctattctaggaaggagaacccggtagctgctgtgatggtctgggcgatgcttggagagacacaggtgatggtctgggcgaggattggagagacacaggtgatgatctgggcgatgattggagagacagggctcggaggaaaaacagtggaagaacagtcaggactgagcttggggacagacaaagccctggccccagccccagcctgcatggagcccacaaggcagtgggaggcaggcctgtgacgctctgaccaccccactgcttcacctgcatgagctcattgctgcatcctcacctaaagcagtgcccaggacctggagggttctctgcaaacatctcacgcttgcagggaggtgatgtcagagtgatgaggaggaggcagatgagagtgggtgggagtagtgacaagaaggtgccatgtcagacagagtagtcatggggtctctaccaggagcaacagtctgagctgagacccaaatgagggggctgcctgcgaaaacccaagggaggagatttctaggtggagggaacagctagggaaaggcaagggcatctttttctcaccccaggacagggttcctgcagggacagatgcgttgggaacaggtcagcgttgcacccgcccgctatcggggccagcatcctgcatccttccccgccggccccgcttccccgctccgctcagctcctgcctcgcgcaatgccatcttcagatttcacggaacacatttctgctctcaaagggcaatgttgtggccttctcccctcatgaggagacagtggctctgtggtcccctgtgattatcttttcaattaaatcctcagacgcggccaggtctccatttataaattcataagaaaagcctacagacctgcggtggctgtccaggccctaatttgctctaaatggcaattttaaatgatacagtgcaggctggacagctgggccacgtccccttcgttccagggaagagggagcagaacgaagatcagcagtggccctccagcggggctcgccgcccctaccccgttctcggttcctggactcatcagagcaaactgtccgggacacagggagagggtggaaccaggtgcgtcccttgtacccagagcccaggttccgagtgaaggcctgttccgggagtaggcaggtgtggaagagggaccctcggtgctgctggccctggctggggatcaggcccctgtctctgggcctggaagcccacctgctttggaggtgatgtctgcggaatgcaaccttcaggacgcccaggcggagtcacccacagtggggcagcccctgcacaggctttgctggagtctccactgcactggcctaggtccaagcagtcatagcactgcccccagctgcccttctaagccctgtagcctagtggattagaacctggcctccctctggagaaaggcccaggacccgattcagcggcatcattccctagtgcttcgaccctgacctctctgagatggggtctatgcctcggggatgagtgctccctgcactggggggctgtgaccaccagcctgtggcccaggacactcaggagtgctctgtgctgttagctcgtgtccctggcactgccctgggcaggctgctgcaggcacagaggggcctcagacccaaagagcagaagggacagacaggtccatggatgcatcgggatggagggaagggcctggggctggctgcacaggggcactttccccacctgctgggttggggatgattcagggcaggcttctaggaggaggcaacagctgagcgggagtttactgagtgggaaagggcagaggagcaggggtccaggcaaagtggacggcatgttccccgcctcagggggatgaggggatggcgtggagtgtccacagagcctgcagctggtcagggacaggcactacaggcctagtgggttgtggcaagcgggggacaagatcacaaaggactgtggctttgacgcctgaatgcacagctgctgccctccgggagggccctgggcaggagtggacaaagaccctctccctcctgccccctgccgaatgtttctttcacacacgccgcgcttctgggaaggacacgggagggcagactaaagccggaagaagtgggaggcggcaaggggatctggtcacatcccgctggccccatcccattaagacgaggctccgctgagactggtccccgctggaggggcctcattatgtttgtaattgactccccgctgtgaggctcccactctagaacctggtttgattggggcgagggcggaattaacagaacaaaactgccttcgctcagatggtgaagaagaaatcacagcctgagtggatggggccaaagtgttcatcataaaaaaaaaaacaaaatagccctggagaccgttactgtcaatactacatcttatttcattgattcctttaacaaaaatggtatggagcccctggcctgtggggttttgcatgctagacacggtagagtttgctcaggatatcggccgaccttccttgtggccattgattattaatatttgtaatgttaaagcatcaaaagagggaatattcttaggaagacaaatgctaatgaccaaacatcagaaactgcttccagaacaaacatcccatcaataaaacatccacaaatatgtgtttgccaagttgaatgtaagggctcgggctgcagccgggagcctgcggggtgggtctgcccatgcgggaggggctgagaggagaggagagggagatggcgtgttcccagggagccctcagcccaggggcaattgggtgcctacagggaccctggtaatgtgggattgggtatacggatgcccatcaggacagctgacctcctcgcagggagcggctccagaagaggggcttcaccctgcggttgggaagggctgaggggcgtgcactccaggcagaggcagcaggagatgcagacattcagaggcaggatgcccatggaaccttctagcagcttggcaggtggaagcctaagaatcctggtgtgggggtgagactggaaacccaagacagaatcgggtcacaaagggccccgaatgccaagcataggcgtgtccgtcaccctggaggcagtgatgatggctgggcggtagcaggactagaagggccttttgggaggaactgctcctggctgggaggctgtgacttggcaatggggaggtgggagggtgggcgcggtcctggcatggggtcaccagggacccggaggctggtgcagtcactgctaggcaggattgaagaggcctggctctggcggggtctggggggagaggggttccccatgcccacttcacctccttccagtgcattctgcacacagcagccagagggtgtttcaaaagtagctcattggtgatgtcgttacccagctttaaaaacttcatccggtgtcctctgctgcacccatctgaagctcctaatgaagctctgtgccttggcatgtgctgagatgccccatgtctgctccctggtcggttgatggcctccccctcagagctggggactctgtggttgtctttgctcacccccgtgtctccagggcctcccagagcctggcacctgctcagcgctcagtagatgggtgttggatgaatgaatgagtggatggatgaattaatgaatgaatgtgggaagggccagatttgaaaatgggttggaggcaacatctccagaaacagcaggctgggcagtgaggtcagcgggcagagccccctctgcggttggctctgcctgagtggctcctgtcccctctccagcctctctttatggcctgatgggctgacaggcatccctcccttcaatgtcagggagctcttatgcaaatgtcaaaaccccactcttcagatattggacacgtctttaccaggtgaagactctgggccagccctagggctgatgtccgcagcacggtccctggctgcaggagggcatgggccagcagggggctcggagcaagtgtcacagagtccccagctctgtgaattctgcatggggtgctgggtgggcccagttcggaagcccagtccacagtgtcaccaagaaggtagctgggaacagagtcagcagatgagggggagtgtggacaaacaccctggggagcctcgtggagcgagactggggtctggaagttccagaagtctctgtctttgcttcctggggctgctataataaacgactgccagctgggagcttaaagcaacagacatttatcctctacagctctgggagcccgaagcccggaaccagggggtctgcagggccaggctccctctatgggctcctggggagttcccttctggctgtcccacctcctggtggccctggcagtctgtggcttacagactcctcccccagtcactgtctccatcttcacatgactgtccctgctgtgtgtgtctttgtccacatgactttcttataaggacacccagccttggacttagggcccactctggcctcctcttaacttggttccatctgcaaagaccctgtttccatttgccaatgccaggggtaaggccttaaacataccttttaggggcacccgattccaccaaaaacattcctttgagaagtggatccttatggctggaggttgggggcatagggtgccgccgtgcctgggacttggcaggtggaaagtcccaggcaggaaggaaggacctggaagacaggccaaggagtggcaacagtggggactatggagagctggtcatggtgggaagacaagggcagatcagtgtgtggaacacctgccacaagggtgagggggcgagcaaggaggaagtccaagtgtgaggaggcccggatgcctctgaggtccatcctgcatgtggtaggctcggccggccccccgagggcctgagaaacctccctgtgcagcagccacaggagtgtcccagcctgggagcagagcaagcaggaggctgagacagagcatggccagcccagctgcccccctcctgccacttgtctcccagggaacccaggatcctggagccccttccctgtggctgcagacatgaagaatacatctgaagaggaatcagaactcgtgactgtgtgtgcacctgtacatgtgcatacatgcactcatgcatgttcatgttcacacacaacacacatacacacacatgcacatatacatgacccctgctccccgctcttactgtggtgctgtggtctggggcctggcccaggcctttggaagactgcatgtccagtgacagactcaaagtcagagaatgcactcaggccaggcctccatcatctgaagataccactctgaaggacactgggttcttggatctggtgccactgtcgtccatgttcttgtcccttcggctgtgacgaaggactccagtctccttggctggggctgggggcttccctcggctgcctaggagagtgagtgggcactgtgggcccaagcggaaggaagacaggcaggggctgaaggctctcgctggcctatacccaggcgcttctctctcctgagagccacaggctggtgggctcagccatgtgccagcccgtgtgctccaggaaaacagaatcataggacatggatggttaggaaggatagccaggaagctagaggacaggtactcaaggagagatacagatggagggaagtcgatagacagatatacacatagacacagattgatacatttaagaacttggctcatgcaattgttggggtttataagtcaggaacctgtaggtcaggcctgcaggctggtaactgaggcaggagtgggtgcagcccacgtctgactggggctggctgggcagagtttcttcttctctgggatgtgtcggtgtttgctctcaatgccttcaatggattggataaggcctcatgttattttgggtggtctcctttaccaaagtcctccatagcagcgcctggatgactgcttgattggatcactgggaaccatagcctagacaggttgacacataaaacctgtcacctttctctgccaataaaggtgacacagaccttttcctgatgaaaagccaagtagaaaatgcccccaagaggaacagcactgggccagcagtccccaagtcagcagggcggccatgcctcctgctaggagtccctctccaatcatgaaccctctcttgccacacctctctaagcagggacatggcccagcacctgctccacgctctccctctgcttccattttctccacgactctggtcatcatttgacatcctatcccaccagcattgcctactgtctgtgtctcttactagaaggggcaggtcttccttagacagccaggttcaaatctccaactcagtgctatgtggtctaagaaactcacacctgctgagctcccttgctgtccaggcaaattccccaaggcgctctgaacttattgacctcctttatgtcacccccagggccccagctgcagacacggccaggttctgactcctcccactcaaggccttgcagctgtcagtgacctcagtggaggagaaacagcccacagggttccacctgggccgtggggagggggctctgtggggctgagtccgtggcagggcagtgctgtggacaggtctctagataagacgtggcctccggcaccaaggcaggtccaaatcttgggaatagcctgagtcattcagagtcatccttctggctatggggacagcttctaggacagactcatggataacagtggggtctgactgaggatgaccatggctgactggggctgtccaggactgaccacagctgactggggctgaccgtggctgaccgtggctgattggggctgacatggctgactggggctgaccgtggctgatcggggctgaccatggctgactggggctgaccaagggcaagggcctcctgaggagaacagagcggcccagtgagctggctcccattccagatccagtgctcttcaagcctgcacatgctcaaagttggattggctaagagctctgcaaagccggggtctgaggctcccctctgcttgtctgacccccagagcaaagctcagtgtcaagaactggagtctattcccgagggggcacagaaggcgggaggacatggatggagacaaatggccgtgagatgagatttcctgtcccactgcatggagcccagtgaagccggagagaaaatgtgtgtaggaacatgaagatccatcccagaattctgtctccaaatgagtgagacaagcgtggaacagactgggcttaattgctggatgacctgggccactttcccttccagagtccccgagtagagggtggtggccattgcacccatttcacagtgaggtaaactgatgcacaaagtcatcgtgttggctatcgcgcacacctgccctcagatgtgtgtctcagaatggtgcctgggacatttcttcctgcttctaggctgctggagccccagggcccatccccagccaccgggggcctcttgagcccttagaaagttagacacagggtgtggcaaagggacagtgtgttaagcagcccctccagaggctggggtcccgcagcagaccacccataacgggagccatttgcccagtgaggcagtttgaaaaaggccgggcgtgtagggtgcagtgagtatgcagtgatgtgggcgctgcaggcaggaggaaggtgaaacactcagcctgcgaaggaggctcgcttcctttcaggggctatgggcagcccaggagacccctccccatggtctgcgtcaccagctccccctcctccagggctttgttgaaatgtgccttccaggtgaggcctcccacacccccttatttaaaagagtaccgccacccccaccgtccccacccgtacctcagctgcctctctttcctggccccgacccctgctgaaccctgtaattcagctattcactgtccattactctttcccttgaggcaggggtagagtctgtcatgttctccgctgagtctccagagctaggacagagcctggcgcctggcagcccccactgccttttccccaatgattgagccatgtggacctccccctgctctgacctggtcaccactgtatcccctgaactttgcacacggcttcctgagtgtgggtgcccgatcaatatttgaccaatgaatgagagtgtctataacatggagacagtggtgtgggggttcctgctttctgtgatcactgggaaggggacagagtgggcacatggcataggcactcggcccatgacaggggagacctctcacacagctgggcaccgaggcctgggtcggggacccttcggctctgtgttggcagggggcctcggccaagtcactcaaagcctccgtggcctggtttctcctctcctgacgggctctcctgatagctttgtgtcacctaataaaaatgacttccgagggttccccacgagcctccagggtcaaagcttctctagaaggattcacagaagtctgataagctgtgttcctcatggcaatggctcattaccaggaaaggttacaggttaggatcagtaaagggagaaaggcacacagggcagagtcgggaggagccaaacgccagcagccagctgccctctctctcggtggacttctgtgggtgccgtttccttctctgggcgagggtatgtgaccgcacacaggacacaggacatgttgctaaccagggaagctcagctgagcctcaatgtctgggcctttccctgggctgagccacatcagtgtggctcactctccacgtgccgccctgagcctccagccctccctccagaggccaagctgagaccacgtgccctaaagcccccagataaacaaacctgctccaattagacaggacatcctaaggcttagaggtcatctcccagaagacaatcaagggccaaacctttctttgcaatgtgcagagtttggacaacccagccctgaggcattagccccttctgcacaccgctgccagggagagggctctgcgctggagccccctacccctgctgtgcatgcttggcttggcagggcttgggcctctgctgggctcccctcgttccttgttcagggcctggcaatgtttgcatcggggggccgtgtccctcttctcctcctctccatgaggtcttgggacaggccccaggacgctgagccccaactctgcatggttctaggatacagatgctctgcaaatgaatgtgaatgtgaatgtccagtggtgggtgcagtgagcagagtcagcctctcactctctgactccccattttaatgagcaattatttggtacccacgtgtgctctgttaggactggggatgctgcgatgcacaagaaagaggcagccctgtcctccgggctcagtgtccagccctgggcgccatttattccgtgacacctggtagtgaatgctgctgggagaagctcagggtctgcttaggcacctgccagcctcgccatgtggctgagcctgagctgagtctgacctatgagctgaactcctcctttgggcaggaagcccccttctgcgtgctgcagatgggtcagggtgggcctggagtggagcggctgtggctcacaggggtctgaagtgtggtggtattctgggctttgccctgaagcagggacatgtctgtgaccaggtgttgagcccgagagtctctgatggcacgtgggctttggagtgactgcagcgtctgggactgtgtgcagagaggatggatgctggtgcttgagagaggcctgtggctgcattatttagactagagatggacatggagaagtgacattcccaaactcttccagccactccttcccctctggtacccacagagccagcacagcaattcacaaaaatacagcccggggggttggaggaacctgacccactgcaggtgggagaccatgctctgaagctgggcagcgtgctgggagtgcaggctgtgttcagaacaggcacccgccaagggggcgactggaggggacccagccctcgctccaccctcaggctgctgttggcctcaacagagtgaggaaacagttccacctgccacagtgaaactgggatggcaggtgccccgggtagcccagagccgcggccagaaccatgtgtgatattgcggtggttgtgagtccacctggagttgtggggagggcgctgaccgtgcagacgcatcccctccacccgccccaggctccccagctcgccagggccgcaggccggtgccttggaggcttggctgggacaggagtggagagcaggtgtaccccacagcgtggcctccctgggtgggttcacagtcttgatatttcattgacgaaatgagtgttcccttttctggagaaacaggtgatatgtggggtttttaggaagaaaaacagaaaagataggcctgtgaggtgacaggagaggtggcgaaatcctgaggggcttctcctcctagaccgactgtcctcccttttctttgaaatcaagagagcccatctgactcctgctaagtagccctaagaggcattctagtggccctgcctggagggccctgtgagccaagccttggccacacatggcatcctctttacccagcatgcacctgagtgggagccacagactttcctgagtggcaggtgtggcaaggacacagcgtctgcgaccctgagaacaggagcgtgcgctcctcttacagaatgaatagtccactcattgtgctcaccacacaggggtcttcgctgcacagggatggcacagccccgggagggagctagggcacaagaatgctgccaggcagggctgggctcggtcagcagggaaggaaagagctgggtggtgggattctgcctggagaacggtggcctctaggcggaggtcggccgggaggcccaggaaacctgggtggcatctggggagatctggacatgtggagtcggcatccggcagggatcaagggctctggagagtttggagaggtcgggggagccgagagggatggtcctgaatgtaacgttgaccattggtgagccagagaggagtctgctgaggctctgcctgtccatatttgaaagtttaactttgggccagcactcaggggcttccctggagccgtagggaagggtctcctgagcctcggtggtggggagggcactactgagaaactgacatccttgtgggaacacagagctgggtgtcctggagagaacccagggaaatgctggatgctgccagaacagaggagggtgtgcccagcaacgagagagaacgctggcaacggcgacctttgtcacgctggatggttctgcctctccccgctcatccacctgacgccgttcagacctgtatccccactgcggacacccctgacgttgttcagacctgtatccccactgcggacacccctgacgctgttcagacctgtatccccactgcggacacccctggctgctgttcagacctgtatccccactgcggacacccctgacgccgttcagacctgtatccccaccgtggacacccctggctactgttcagacctgtatccccactgcggacacccctgacgctgttcagacctgtatccccgctgcggacacccctgacgctgttcagacctgtatccccactgcggacacccctgacgctgttcagacctgtatccccgctgcggacacccctgacgctgttcagacctgtatccccgctgcggacacccctgacgccgttcagacctgtatccccactgcggacacccctggctgctgttcagacctgtatccccactgcggacacccctgacgccgttcagacctgtatccccaccgcggacacccctggctactgttcagacctgtatccccactgcggacacccctgacgctgttcagacctgtatccccgctgcggacacccctgacgctgttcagacctgtatccccaccgcggacacccctgacgctgttcagacctgtatccccactgcggacacccctgacgctgttcagacctgtatccccactgcggacacccctggctgctgttcagacctgtatccccactgcggacacccctgacgctgtttagacctgtatccccgctgcggacacccctggctgcagttcagacctgtatccccactgcggacacccctgacgctgttcagacctgtatccccgctgcggacacccctgacgctgttcagacctgtatccccgctgcggacacccctggctgctgttcagacctgtatccccactgcggacacccctggctgctgttcagacctgtatccccgccgcggacacccctggctgctgtggtgggctggagaggctccctctgaaattcacaccactcagaacctcagaaagggaccttctttggaagtagggtctttgtggatggaattaagggcaggtcctactggagcagggtgggccctaaatcctatgactgatgtccttatgaaaaaaaggagaggccgggcgcggtggctcgtgcctgtaatcccagcactttgggaggctgagacggggggatcatgaggtcaggagatcgagaccatcctggctaacacggtgaaaccccgtctctactaaacaaaatacaaaaaattagccaggcttggtggcgggcacctgtagtcccagctactcgggaggctgaggcaggaggatggcgtgaacccgggagacggaggttgaagtgaaccgagattgggccactgcattccagcctgggtgacagagcgagactccatctcaaaaaaaaaaaaaaaaaagacagtgaggagaaagccacgtgacggatgaagtgggcagagagtagcgtgaggcagctgccagccaaagaacgcaggagtttgcccaccatgccagatgctaaaagaaaagcatgaacagactctgtcctggagcctttgggaggcacgtggtactgttgacgcctcgatttgggacttccatctcctgaactgagagaataaatgcctactgtttataagccacactgtgcggggtgctttgttatggcagcctgagggacggaaaaaagcacctactgtacatggggtcccaggccagcaatgcccacgtgtcttccaaggggcttacaacgtcctgggagggagtattcctgtgtttccgtaccctcttgggaaactgaggccaaaagaattagagtctccagggggtggggggccaggggagggagagcattacgacaaatacctaatgaatgcagggcttaaatcctagatgacgggttgatgggtgcagcaaaccaccatggcacatgtatacctatgtaacaaacctgcacgttctgcacatgtatcccagaacttaaagtgaaaaaacaaacaaacaaaaaaccaaacaaaaacaaaaacgagtctttcagaaagtagccgattcaaaattcaaatgcacgtcttcaaagcccaggctctcctgtatctacagatgttattttctgacttactttcttcgagcatttaagtgtttttacctctctttgcttgcctggtgtttcctagaaaacacagtgcaataagtatcaacatatgatgggaggcagcttaaagttatccatcccagcggtcccggtaatctactctcaaaaaccttcccacagctcgcgtccctgcgccggcagatcgccgctgagtctgaacgtattttccgaggtgatcgatttaggtgtgctgagaattacatctctgtcttcccacaaaaggccactgtatctgtcacccgacttttacattttcacatttcttcatttggagaaccaaagtaacctgcgtggtatcaagtttatcttcctcctattttatgaattcctttgtcacagggcccagccggagcggcctgctggggatcaaggtggtgttgccgtgggaaggaacgctgtccagggaagccagtctctagcaagatttgtggaacagagaggaggccgggcttataaggatagaaagggctttgggcagaaggtgctgactccagtgtggaaataccaggaacaggaaggcctctgcacctggggagctctgcaagcaattcctctcctttctaacctcctccgttctgatcccagtttaaaagctaaaaaacaaaatgatcctctctttagagaactctgagctgggcgggcatttacaagttaaacgacagcctgaggccatcttcacaacacacaccacctcctgcacccagccctcctgcacccagcctccctcctgcacccagccccgctcctgtacccagcctgcctcctccacgcagcccacctcctccatgcggcctgtctcctgcatccagcccacctcctccacacagcctgcctccttaaggcctcctggctttccttctttttcatttatttgcacccctgtgcgttgcctgctgtcccggccctccccaacatgtcaggacttctggctgattcctgcagggcagactgtctgttcatcctcagggggcgtttgttgagtgaatgaacaagagatgtaggagtctggtcacctgtcctgtgcccacacaccctcctgagggtctcactccacacggcacacactcccactttcgtttgctcaccttccaggacatcacagccctcctggggctcctgcagccttcggtccccagatgagatccaggtctggtctaagccagcatgcccctcccatcgccctgggcagctgtgtctcagtcactcagactccacattaccaggagcatgctgcttagggtggatagttcccaggcagagcccctgggccatcccagccaaggccccggagttgcctccacaactatcccgtcacaccagggctggctcaggctctgctgaggctactccacccacaccaggttggctctgtgggccccacccctcacctggagccccagggccccctgccgggcctcatgtctgcctttggggccccatgggaagccatctcctctagcttctccctggcggctcttgttatttgatatcaacaacacactcttgttatttttcctaacaatggaaaacacgggaaggaaacggaggttgtggggtcgggtggcttcaggttgtaccggccaggccgtgtggacccagcagagggtgggagctgaggctcaggcctggcacccctagaagggcagcttccctgggggtggctagatgcagctagcaggtgcccactgtgggcccaggggagcccgatgaggctcccagtggcaggagggagagacgtgtggagggaggatgccagggtgaaaggaacctgggagagaaaggactgagtagggaggctcagggcgggtagacaggctctgggatgtggcaccatggggcttcctctgtgctggccacagggaaatgccctaaacccagcgggctgggggcaccccatgcctgcatcctggcaccctcactgtggtggcctgttagcttgagcctgacatcaggccctgcataccgaagcccacggatgtcacccacagcacagcctggggatggcaactccagactgaagcgtccctttgtctctgttggttgctggagcccctcgtgcgcgtgacagggacctgcagcacctgcctcctgaggcctctcccataggttcttctgctgttgggaacaagccccgtccagtggaggggggccctccagtggccctgccctcctgtcccaggtcacagcccaacctgagggctggcccacagtcagctgggtcctcactgctgctgttggagcgcccgcaggccggctgggccactatttgcagaaccaggtggacagatggaggggtcttccagcctccaccacacacggggcaggatgcggcctccacgaccccctggccctggacagggtcactgggcctgagtcccgtgtcttgcaagaaggtcccattcagggaccctgatgcctgttcctgcgggacccgaggctgagctatctccttgtaccccagctgagagcgctgataatgtggagcctgcggtagcttcccggggctgccagaacagatgaccccagacctgactgcttcaaacagtagagaattattctctcccagaagcctggaagtcggaaatcacggtgtctgcaaggcatgctccccctggagcctccaaaggaggatccctcctggctcttccggcttctagtggctccaggtgtgcgtgcccccagcctctacagctgccctcccatggtgttttcttcctggatcatctcgtctgtctctcgtgaggacacatgtgcttggatttagagcccacttggatagtccatgatataatctcatcattaagatctttaacttaattacatctgctaagatcctttctccaaataaggtcacattcagaaactctgattgggatgtggacaggtcttttgggtgggtcactattcaaccctctaccgacctcagcgggaagcggctgcatttgcaggctgcctgtctacggggtgttcccagccccagtgcagccctgtctcctacctctccgagggccagccctgcagagcacaaagcccaccctcccgggtggtaacgatgtgactcaccctccatgtgcgtgctcaggggacccctgcaggacccctccctgcaccaagaagcccaccctaaggagatctgcaaagccactggcattgatcagctatggaagccttctctgggtaataaatcgaagttctgttttcacaagctgtctgttacattcccttggcccacagtcaccagaggatcctgaagtgggctgtgttatccccatcctacagcagaaggggtggctcctggataaggctgtgactccctgttggggagtggggcccagacctccacttccccctccccttgtctgggctgccctcagaattgtctctagcatggacaccagggtggtggcttgttgaatgcaatgtaaattgtaaggaaaaatatgacatggagctctttaaattctctctcctttgcctgcactagagagagcgcgctgcatgcacctggcctctgcacttctaccatctggggatcaccagcctgcagggcagctgcatgctaatctcagcttcccctagactcacgtagcggtgatagacggggcctcttctgaggacctcagagccgccttggtgggacttggctcccccgcctccagccccatgctgcctggccatcctcttctctgcatctctttctctcaattaatccccagcagctacggtaccgagggctctggctgtgtgctctctgcgctttaattaggggtcactgtgaacagtattatttcccaggcttgccatgattctattaaaattttcttttgtagacatcaggcatagcctgatgtctacaaaggaacgaaggaagcaggaatccggggcagagccgctcgctcatcagcaagtgctgggctttcttccctgtcaccgcctccaggagcgtagccctgcgatggccagtaggtttcagcatttaaggtaatgcgcatctcccggtacctgagccctgtgctaggagaggttcggaaattaaggcaatcttggcagccaggagtgtggtcatcaactagtgaccagtctgccatggtctcaggcaagggccaggctcccgtgggccggctgtctgctctcccctgtcaagtccttcagttctgctgtcctgttttgcagttgccaaggcattgtttccagcccagaaaagctcaatgaggttcagaaagcggccgcagttgtgcagtctgtggagagagtcctgctcctgacaaacagaggactctgagctgggtcaagggctgagatcctggggatcagcctcagtctcaggctgagggatgaggtcagagaaggagcacttgtccccatgagcgccgcctggctactgcatgtggtgcaggtgccccctctacctgggctcgacacacccactcttgctggtgcagaccctgcctcctgcagaccctctaccacatttcccagagcatcctccacagcgactttcccagaccttccctgcctctgtccccaggacctccttccactcaccaggacaggaacggccatctcattgacagatgtggaaatgggggatccatgaggtggagggacccatgagtgtctcagccaagacgggcacgtgtccgtcactggccatggcagacatggccgccctattgtccgcagtcaaatacatcctgactgcttcctgttgctcctgtcttctgagcacttggatgagatgagatccttgcatcttaaattcgtttataaagctgtttcataaatgagcctggtttacatgcttaaacttctgaggcagctaagtccccctgtgccatttgacaggtccgcacttgcttggactaccataaatggtcactagctacatttacgtattcgtgctttttcattcattcattcaacgtttactaatcatttaaggagcacctcctatatggtcagcagcatgctaaggctggggataccttcatgaacccacatttcagttggggatatggtcgctaaccaaatggttgcacagacagcaagatggaggctgaaatccgtgcaacgctggagccaaaagctggttccctggaccctctcatttggttccttgaccttctgtctttgggtgctgggtggcaggaagctggaactggttgcctagagtcatgttctctgggctcttactccttaaattccttccactctttcagatgctgccatttccaagcaccctaaacccacttcctaatttgtggctgcgtcgtcgctggtgccttcttgaattgatttgccgctccctgtgttgcttttcgagttccttggctgcttgagttctcagtcgttgctggtgtctaggaagcatttacaatttcaaaggatctcttgaaggtgtgaataatttctcaagatgtctctcggtggtaaataatccatgtaaactgtccccggccctcctggcccctgcagatgttatctggtatctggatatctgtattttaaatggtcccagacagtgttctaatgcaaacaaggtgacaagtctgttatttagagtttgaaaatcctgtctgtgcatgaaaatcaatgcatgtaatttgtgaatcaaaataatcgcacataatttaagtaaatgctgcatttctgatgttcacagacggagtctgtgttttggaaaacacaaatgcctgacaaacccctgtcaaaagccctgttcatcaggaaaatacttgtgagttgtggttcctattctctggtgtgactggggctgggtgagtggtgaccaggacactgacagggctctggagccacaaggaggggcattccagcagagaagggtgtcctgtggctaggcggatggtgaatgccaggctgggttctccttctataggtggagggttggaacaggaggctggtgttgtatttcaggtctagaaagatctccagacaacaggaggagtctgataaaagggcacaagatcacaggcctggagatcagcgggagggccctgggctgacaccccaggggcctggctggctggggaggggtgctggccttgttgccttctgcagaagggcccaggggcctctcccggcttctcgatgctctaagcatcgcctgcctctgaggtggctttgggagctccttcttcaccctcctcttgtggaaaagaccatctcccttctgactcggcctggggggagctcaacacagctcaggacagtgcggggtcccagcctgcctccctctgccaggcctggtccagtgtagggggtgaggctgtcaagggcagccttccttgagggaagggcagagctgaggactaccctagatcacggagctcaaccataagaaaggtctctgccccaggaggatttggtcttttagagcctttgtcctagggaccatgctagcaccccagaattgccactgccagggaggtggggctgccttggagcttagagaccacctttccttgaaggagggagagggaggaccggcaggggtgaggatggcagacatgcagagaaaacagacagacagatggctcctcagatagctcagttcccagttccatgcaccgtccgtcctggccccagcaggggtatccagtgaaatgggggcaggttgtttgcaggtgaacactggccagtgtgtgtaatggctatgcctgtgaggccctctctccggctggctggcatctccgtgccccaggtcatctccctcggggtgtccccgctgcactcctcccaggcctgcttctccctgggcactgccctgcttcctctgtgccctctgcccatgccttagcctccagaccaccgtctcctcctagggacgtacctggcacgtggcaaaggctccacaaaggctggtctttgttcttaccagctgcccagcggctggtctcgcccctcctctctgtccctgccctgccgcccttcctgtggcttcctgaaaccttctgctcttttccctttgccttcccttgggacataaaccatatccactccccggctctcctgccatctctctcctctcccctcctccagttctaagttccctgtaccctgagccttcctgatgtcctctgaacacagggcactgattttcccttccaggccttggcacatgctgttccctttgccctctcacctgagtaacccatgctcagcctccagcatgggttactcgtagctaacccatcctccaggaagccagttgtggtgctgggtggccctgaggctgcactgggctggggcaccccacccctactcctgcagcagctctatgcccctgtcatggagtcccggtctcaaggaccctgcatgagcatgcccctctctgcaggcaggtgcagcggctgcacttttcatgctggtgtccccagatgcccaggcaccagcacgcggcatggcgtaagcagctgctcatttcacgctgctgactgaatccatgcagagggaacaccttggctaggacctctctggattgacttcttcactttgaccacctggccagcaggtcccttgacctctctgagcttctgtgatctcatttgtaacaggagatgatagcggacaaggcttgtggttatgaaacctgtattaagtctgcgtgacccatgctcctctgagcccctctgcacagcagcccacccaccccccgttaaggcagctgtggcttgatccccatttgttgggtaagtgggagggtgagggctggctcagggcacccatcaggtcaggaggggtagaactggcccagatgccacagtggctgtccagggctgtgctcccagctgtgggaaggcagacagcaggggctgcctggagcaagcccagtgcagtgcctgagcaccatgaatgttggccaccaccctttccatccagtctttgcctcctggaggctgggcagggcaggggctagagatccagggcctcttcctcctccctccttttctggcctatcttctgcctccagtttcaccccaggctgagccccatgggcaaggaattaggtccctctcaagagacaggtgcacgctgctgctcccagcaggcccgacagcctggccctctctccagagcagggctgcccacctcccgccacctgtaaatacatgatttttcttgacatctcccgagtcctccctgcctcgcccagcccccggtaactaccattctactctctgcttctatggattctgctctttaagaagttgaacctatgaggtcgcgcggtatttgtctttctgtgcctggcttgtttcacttagcaccatgtccaccaggcccatccatgttgctgggaatgacaggggtcgtcccttcttcgtaaaggctgactaggattccgcggtgtggatacaccagggttcttcatgcatcatctgttggtgatccccaggaggattccgggtgaacgcaggagtacagggacctcttccacattctgattttatttccttttgctatgtacccagcagtgggattgctgcattttataatagttctatttctaattttgaggaacgtctgtactattttccacagtggctgtagttctgtaaataattaatgaatgagtccttccccagccccttggagactggctgctgacaagcatacctgaaggaaatggttttaaaaatgtaaatgaatgttttatttaataaggaagtcaaaatcctttcttcttaatacagccaggcttccaggagttaacagcaccagggaggaagaaggtaccatttcccgtgcacctgcggagcctctgaccccagggcaggcccggactcctcatctcccatattaccttaggaaagcaatgctaaccactgcaacataagagccccccaaatacataattgctcaaaggcaacagaagttcatttctcacccccataaagtctaaatgatgctcctcagcagcagcctgtcctccaggcagtgactcagggacccaggctccttccatctggggtgtggccatgctcctgccttctgaggtcaccatgcccatccagaattaagaaacaaatggatgtttcaaagtgcccatctgtattggtagaggggaaagaggatgagaatctcaggtgggagggtttgggacccagcctggaagtagcacataccatttctgtgcatgtgaccctggatgggaccaacccagtctcaggacctaagtttagtggagtttagaaaatgctgtggcagcccagagaagagaggagatgggttggcgaatcccatgtggtctcttgccagattttccctctgattcttcagaaaaggaaagaggttcgtggaggggcacagcagcttcccgaggcctggatcctaccggatctgcctgacccttggtgtctaagcagctgcttgtgactgtgggtatctctgtgggtacatctgagtcgcagtgttggatctgttggtggtcgtggttcaactttctaagccactgccttgggcttcagtttccccagctggaggataaagtgtttggaccagataacctccgattaccggctggctaccctgctgtacccttgctgagctctgcccagggtgacctgagctcttgtgggtgcatgtgtgtgtcccagaagggctgggctccagctggtcagagagagaacacgcggagccatgtcaggaaagtggacacaatgccatatggaagacaccgctgctcagcctggatgggtctagctagatgtcatttttaaaaacattcctttttatgattttaatagtaatgcacatgcattgtgtggatattaaatgacgtgatacaccctcgaaataaaccaggaagtaaaagtgtgttaacactgggacacaagccttttagtttccatctggtgcattatgttcagtgcccacttaacatacagacagcaagacctatacacacaaacacacacacacattcacacacacacacagacacacacacatacactcacatgctcacacacacactcatacgttcacatatggacagatgcatggatgcacgtgagtgtatttctatagctgagatcttattccgaatatagttcgtatcttttgtacaaatatagttttgtaacctgctcttcttggcgtcacttcccatacgatgacagactttgcatgagcttccccatgagtggtccacgccatgagcctgtagtgactgatcgagctgtttcccggtgttttatatcggtgtggtttccatgttttagtcctttaagcaatcttgtggcgaatggcttagtccatgtgagctgctataacaaaatatgcagactgcaaggcttaaacaacagccatttgtttcttaattctggaggctggaagtccaagatcaaggtcaggttctggtgtgggcctcttcctggcttgcagatgtctgcctcctcgctgtgtcgtctcatggtgtagagagagagagaaagctctctggtgtctccttttataagggcactgatccccttggaccagggccctaccctcatgacctcatccaaccctaatcacctcccaaaggccccatctccaaataccattaaattgggggttagggcctcagcatgtgcattctgggaggctacaaacattcagtccatgaaacagggaacagctttggacatcagtccctgcctgatttctgggctgtttccttaaaccacatccttagacatgcagtggttggcggtaaggggtgtcatccggtccacagctcctgacttctgcagcaaggagcaggggattggatctttgggctccggctcgtctctgccgctctgaactggaagtgggtgatggagcaggaaggtgctggtgcccacagcctgtttccctgggcttggagctgcccggctgggggcagagtggagcgcttgtgaacacaccatttctcctgggtccttggcctagtctggctttggtaaggaacagctgaagaaacagagaggcagagcaaggccctgcgacgtcgaaatggattgttctcctctagcaacggtgcctgtcagcggtgctggtactacagtcagcttagaaaccgtgtggccatcactgcagcctcagcgtcaaagcctcgcttgccccagactaaatgctgggggagatgaatttgccagaactctgcctccccttggagctgcatcaactcaggctccagagcctgtcctggggacccacgctggctaaaggaggctacggcagaaagcgaggccaggctgggttcaatgcgcccagcgttgccttttgaaggttctgcttaatccatgtgtgccaaggaagaactgggtgcaaatctctgcctcccccaccagctgtgtgtcctccggcagctcttctatgttctctgggccttgctttccccatccatcagtgagaacagagctccttccacagagcattgttgtgaggtcagcacaggctacactggtggcgattttctccttggcaccctcgtcaggccccaagcccggggcctccttgtacatcatggaaatgagcagttgtcctagagctcacaggctcatgtcatctcacagctgggagggccatggacgtcagtcacctcattgtgcagatggggaaactgaggtcacgaagaagggagcggcctctcgtctccatgatcctgatgcctgggcctaggctcttgaacaatgcaggccctctgcacttctccctcagccccctgattgagtctgagctgcgtggtgacccctcagaggagctccagaccaggggccgcagcccccacccacccagggaggagctgaggcccagggtgcctgcatgctttacctgggccacccagagaaacagggaggcacctgccggcctggcctagcaagactgttgggaatgttgcctgggcgagggacagaatgtgggccgagggtggaaggatggggaggcctggtcacagaaggacttggaaggccaggctagctgtcagttccaaagcggtgcagaagagaatggacgggggtggggatttggagctctcttgagagtgaacctgtcttgcttccagaaggttcttctcatgccttgtgaagtgtgtcttgggaagggagggaggagaccaaagcaacctgactccctgtctatcaccctcatctcacgacaccctcctggaacctgcaaagaacttctgtcctccctgctgtgtagataaggagctagaagcctggagaagtgagatccaaggtccggctgctcaagctggagaggaatgaggattcgcgcctgggtctgactccaaggcccttgcgcttcctaccacaccacccagcccccaggaattagaactttctggaaagctactggagccccccccccccactccccacccgttccccgtcccccgtcccccgtcccccatcccccatctcagggcagtgagcctgtggtgctctgcacggaggctgtaaaattagcaacttaattttgggtgtcaggaaatcagttgaggggaaaatgtgttttcaagggattagttttcttacaaaccagcatgataaaaataaagagaaaggagagtggccgggagaaaggacagtttctaaatttatagcagggattcattattcatgggccacatctgaaaaggccaaagctacagaagggagcgaggcgtgggtgggaaagtccacggcggaatccaaggcgccttcaccaggcgggagatgacaaaacaaaggaccttcccatccaagaaagtggtgagcggctggggaaggcacagggctccgggcacaactcagcttatcaaagaagccagagctgcttctccaggcgaggccaggtgccctgtgtcagcaacccagtgcccgtgcagaggtttagccttctgtgattgcctggcatgtaggagggcaggatgaagctagggtgggtgctcttgcgctgacacacgtgagctaattgactccaaacaatagtgttgtggatggatgttggctattctgcagaagaggaaactgagggtcagagtggcaaagagagatggccagggtcaggtgggtggtggcagtggccgaagcctcaggcttgaggatccgcatggcgctctcttccctgcccctgccacactctggtgttggtgcatttaagggctaaagagaaaggaacgtgtcaggagacccactgtgtgcctcttaccatgtctgggcctcccctgaggagggcctcattcagccttccccgcagcacagcgtggcagggttggtgctgttgccagaggaggactggggctctgggatgggatgtgggagacttgtccagggctgagcagcttctaaatccaagtcccctcccaaacccacacccagtgaagggtgaggctgtctcttaccccctcctcctaggagcagcccagctccttggcaggagatggacctgtggagattccttgccccgtgggggcccaaccaggggtcaggcaagtcacaccgccattcccaaaggagcccacagttaggacttccccaggagtttgtaattctggtccctgctgtatgttgagcaccagctctgtgcctggtcctgcacaaggaaccacacgtttcactcgcttcatctccacatgacccagggaggtaggtgctgtcatggtccccaccgcacaggttgggaaacggaggatccacaagggtgagtgagttgcccaaggtgactcccttgtgggagaaccaggcctggacccagatactgtcccctttccagaaaatccatggcctaaaatgccgaaggcagaggaccagcaggagctttgtggaaaaggccagataacgtgcatagtggaaggaacgtttttaagaaatgcgtttcactgaagggggtgaagaaatgcatttcactggaagcgggtgatggagaaggaaggtgctggtgcccacagcctgtttccctgggcttggagattcatctcctccagtttgaccaggcctccgtttcgggaccctcttcctggatgacatccacgcacccacatttcaaatggctgcccttccactggggggccaggatgagtctggagtcctggaaagggaaggattggggttcctcctagtcctcccttagccagtgaggttgaggacatcagtgagatgtggacccctgatggctgtgggccaacctctcacgcccaggactcaagaggttctgtggacatgggtgacccagtcccctgccttggctgatgtggggatcgcaaccctttgctacgggtaaaggggaggcccagagtgggagcacctgcccagaggctgtgttccttaagtaacttaaattacatagagaacagtttccagaatgtacaggcaagacgccagcagcaaatcactgctgggcgacaacacctctgagtgtggtgcagagctgctctgccacaaaattgagacccatgtaccaaaatcccaacccctccctagctctggaaagggtgcagagagcacgccctgccaaggcggccaggcagagctgggtgaggccccacctcctagggacgcagggcctgggcagcaggggatcagcacagctgccagcctcattgctctaagcccctgatcccaagatcatatgaggaggaaatgaagccacgtggaccaaggctgatgcctggagcagaggtgtctacaccacagagtgcctactgggtgtcagggctgcccgggagctgggaatgccagcatgagcaacccctggccctccctctgcgggtgtccatgggagtgcagtgccatagaggagagggacgagtgcccagggagcccagagccctgtcacccccagcaggggaacatgtcaagctgagcgtggagtggcttcctggagggcagctccggggccagtatcttgaaggctgcaagagggagccggctgaggctggggaaaggggggcagggggcagcaccgtggagacgggagggacacggcacagggtgcatgtgtgtgcacaatcacgtgtgcatatgtgggagtgtgtgtctgtgcatgtggagatgggtgtgtgtatttgtgtctgagtgtgtatgagtgggcaaatgtagcacgagtatgtgcatgtgagtgcatgtatgtgtatgcatgtgtgtgtacatgtgtctgagtgtgtgcacgtcacccccaggagtggcatgtctgcggtgtgcaccacatggggcaggtcgggggacagtgagacgaagccggactctggaggacatgggagcctaactcaggagggagtgtgatgctggaggccatggggagctatggaaggtgcttgagcagggaagggcacagacttgttctttcccaaggaccctgtgggagttgcatgcaggagaggttccagggatgccactgcaggggcaccagtgaggaagtgggcccagaggtgggggcctggtcaggggagatggcgtggggcggactgaaaaggatagttttgagaggaggatcgcaggtggtacctggaactcgacactggctggcgggtgggggccggcatgggagacaggccatggggctgggctctgttctccaagatggagaaccacacagggacactggccatcccccctcattttgccccagctgagccatgccccgggagacccttcctggaaagatcctctcgtctgccttcctcgctcctcaaacgctggcatctggagagaaaccccacaagtcattaaatcactgcttggcaaggttcgtgctgtggtgatgctgagagcaaacaatcggggaccgagccggcacaggtgggtggaccccctcccaggcagcgcgcagtggagaagggccgtgaggaggagggtgctgggtgtgtcaggtcccaggggaggcaggcggctggggagccagctgtcctccttggaatcctggtttctaggccgcatcagtccattcactgggcattcgtgtgtctgctgtgcacccagcaccgtggggacccagctgcggccccagatggacacaagctctgacctcacgggctttctttccggcttctggcacccccatcctgcctgtaacccactcaccatcacccggagcacacccctgcccggtggtacgtccagctcccacctatcagctccctccactctcggtcccctgcacgagctgcccagcctgcccgtggagcccccgggagtgtgggaggtcacgcctggaggagccccgagcagtggtgggcaggataaggtggatcaatactcgccttccttactccaggcatgctctgtgccggctcttggaggtccctggcagcgccaaaccctctgcctgcattgaggacctcctgcaaacaggccctggaatgggggcttccctcctctgtcctaatgtcctgcttttctgtgggtgctacccacactgaaggcctcatctgcttctgggtggtctgggcctcagatctgaggagatagccagtattcaagttaagaaataaccacagaggatgtcagtgtgccggctggagaaataaccacagaaagcaccagtgtgccggctggagaaataaccacagaaagcaccagtgtgccggctggagaaataaccacagagagcaccagtgtgccggctggagactgtgggtgtgatagagaggaaccggcttttacatcgcacgtcgtccaagaggacctctctgagctgaggctgtaactcagggaggccctggctgctggagggcggtaacgagtgggagcctcagcgacctccatgtacccctgagggttgcaagttgcctctcacctcgatgctgggagccagcctgcgggcagcccccgcagaatgaaacccaggacagagccccaggctccaccagccccgactcctgtgattctgccgggaggtttggccttcccagggagctcggctcaagccagcgtggatccagctccaccccacgtgccctctgagccgctacagctgtagcatctcgcacaggtgatttcatcttgggaccgtgagccctggaaaaagcacctatgtttttctcagggtgctgacctgtgaaggcgcgggtgagacgaatcttgccctaccccaccaactgcctcagcactccctgtttggacactgtccccatccctgcagtgtccgccccacagccctgctcccgtcacccgctcggtcccacgccctcgtgggccagtaaagcccaatgctctttacaaagaaccttgctctgttcttggttccttggttgcaatcaatcctgagctttttattgttctttcttggagtgaaaaacagaagcagcacacatccgtgatgacgttaccagacatttgtgctgatccagtcccctttcaagtcagtagggctccttactgtaggacacggtgccatgagctcccagggggcaggatttacgtgttttgatgatccagttccagggcgaaggcaccagggctggcgctggtaacagaatgggcctccctcagcctcctggcttagcactttgcttcatgccaaatacatcaaactgaaccctggcaaggcagaggcttctcgcacccggtcttcctgtgtacaaggcaggacgttcaagatgctgctgttgctgccctttgcgttggtctcattgtccctgtgtgtctggagactgaaggaatcggcaggtgtatttttccttctcctgctctctctttttaaaatgtgtctcgaccagggaaatctttccccactaagacacaattaagtttcctgaattaattatgtacctgacagcaggattagtgattttcttaatttctactgtaattacattggaagaacagtcacccctgatctctctggaaggagggctcccacaacgagcacagcttctgaggcatctgcagtggagctcctgatctgcagacttgtgggcgcactcccggcttctgtggacgctgaatgggtcgtggtcccgcccctacagtgcagtccttctctgttcaaccaaggcttcctgagcgccagtcacatgtgcccaggcagggaggggagggcgtttctgtcacagggacaccctggagtggctggggtggttgtctcatttcatggctggggccatcagaagggaggaggtggcctctagacggcctctggtgctcaagatctacttgtccattaaaacaaggaatgtgccccgtgagagccggagggagggaagaagtccttggaagccagcacgaggcttcgccaggctcagcaccactgtctgaggatgacatctccctggtgggggaagaggattctgtggtcatggtggtccccatggggctgattgatgattcttcaccttgggctgggcagtgatctctgttctcaaggggataatttgtgtgaatgcgaaggaaagccatcaaaaggtggagatggggacattcaagggtctggtcagagcggctactaccatttataaataggagctgtgtggacatggctggtctgactgtgggcctcatccccagccgcctttgttgctcctcctcttgatgtcctggctcccttgatcaccttgtcccttcccataactcccacttcccgtctgtctgggacaggagtacacgtgagatgcagagaacgggcgtgacttgcttaaggccatgtggacagaagctgcaaggttccaatctaaagccaggtctcacgacgctccatctgccaacatgacctctgtgctcagagaccactgtgcggggagcagggaagccggccttgcccccacggcatgcccacttccacgctgcacaccagattcatttcttccgctgtggcgactgagggagaggagaatattataaaactgttagggtgtcagtgacccagggaaagtggggctgatttaaatgctatttcactttaagaatctgtctactcctttatttcttggtgcatttattggacaagttccacccgatttcacgttttaaaattaaccagccgagcagagaggccctgccagcggtagcatcctgcctccgggagcacaggtgcacaggggctggggaatatatctggggaatatatatcagaggcctaaaatatatccatctgtatgtgtatatatgtgtcatctttccagaagccccaaacatggaaaattctccttcatagggctttcaaaatctgaactcaaaaggggaaaaagccacacatatatatgtcacccacactcacggccctggagttcctggcctagttaaagaaagtggtgaggctgccgagttagaaatgagtaacagagttgtctgtaaaaagtttgtctcccagaagtttgaggttggcagtgactttgactcacgtctgctacacacagtcttcagctgcaaccacatggagatgagctagagaccgagatggagatagagacatagagagacagagacggagacatagaggggcagagacatagagagacagagatggagacagagagagacagaggtagagatggtgcaggagctggagatctctatgcagacggagacccagatacacctgcagaaacagtaacagctggagagggtatacccaggatgcagggagaggcacaggtgcagatggaggtgggggtgcagatggatggagacacagctagaaacagacatgcagatgctgatgcagattgatgggccgtgtgctccccagaggctaatgcaggcccagaatgatgttcctgcaacgtgtatggaacaaaggagaccgctggcccctggcttgctggctatcacatttcaatctttctcgttgcaaacttcaccaagaaccacaggctagatgccaagcgtaagcagcctctgggttggcagcgtcggggggctgaggttttggtgccctagaggagaagagctttcctctgccagcccctccctgtcggacttggtctctaggtaacctgctcccctgctactccacccggagagcaggcctggagcagaggaggagcttgtgctttcccacccctgacctcaaacccttacaggcctcaccctggtcactcactgcagcctgggtgccaggggtagggcaggggcctctgtcgcagctcacagctgcgctctcagaagctccttgctcagggacccttgggaatcacacaccgggatcctcactcccagctcaagcccttttctcctgtgcgtacaattgaaacggacatctggcggccatcactgtaattcaaactcaaatgcctttgcctggagaaccaggagtgtggaattcagaggatctgggtggttttggtgttcagctcagcacccccagagctcctgtgactttgtagagcccgagagtgggggaagtggagagacacgaagtccctgctgggtgctgggcactgcactgggccctcggatgcagagcaattcatttcttcttagtaagaatccttaaatcctgctcattttatgagctaggaaaccaaactcagagaggtgaagtggtgccagtgtcactcagttcgcccatggctgtggtgggatttgaacccacatccatctggctctggaccccagggctggcttcccagccatgtggcctgggtggttggtcacacagagccacatttaggagggctctgagcttgttaaatgctatatgctgtcgctatcacgagtagtaagtacaaaccaggaagcttgaacacggggaccgcattttcattttgtcttgggcctcacaaatgacatacccagtcctgcctgaaccatggtatgtctgccacaatttagtgccttcctgctctggtctagctgggacccgactgttgggggccacaaaaggtccatggtgagcagagaagctcgggagccgtctgatggccgtaggcgctgatgccccccggccacctgtcatgcatgatgcttcttgaactggaaaaagtccacctctgagccaggggaccgaaccctccacctcctcctggtaaaccaaagtcaataggggtgaaaaggatggaaacctggagcgccgggagggatggggagcaggactgtgcagcccatggtggaacgggtgagtcaaatgtgctaagaaagcccgatatcatggagccctccagggcgggatgggtgatgaggctagcgttgtggcttctgaattttaaaataagcttggacagcatccgtggaaaatgcttcgtgatgggaaaggggtgcggatgtggtatagggagatccagtggggcagctggggcttccacggagggacataggtggccggcggggagccaggcacggggctgggggctgttctcagaaggtctcactgaattgtctcactgaccccgagaacagctcaggagagctccgtgtgcacagagacacctcagtccccgcatcaggagatgggaccacccctgagatgggaggatggctccagctcacaggcatggaagttgagcccagagacatctgggggtcccccagtgagtctgggtggcattggagccctctcactgtctctcctttctgcataatagtgatattgatgccctcctcatgggtgttctggagacagagaagtcacatgtacaaagcagtgcacacccagggcctggcacggagagggtactcagatacccccgagagcctggctctgccagcgggaacacgaggacgcagcagcaaggccccagagctgggcagcgccagtgagaagcctggcccttcctcttcctgactctgtgaccttcgagagtgatgaactccatgagcctcagttttcccgtaggacgaatggggataattgtcgcggggccctcatagagctggagtgaagattcagtggcagtcgatggacaaaactgagaatcaggcctggtgtgggacgtgccaagcccctagtcttctgtgcctccacttccgcggctataaaacacccaactcccagagtcattgtgaggagccctggcagggggaacgcatagccgtgcagtagcctagtgaggggttcagtccctctctctataggggcactaatctggggtggggaggctgtggaagccagcaggaaccatcaaggtgatcccagtggtagggacactccggggtctgtgtctgctgacagccacagcgtcctgtgtgcgagagtcccagtgaacagcgcgtgagaaaaggaacttcttttagtctgagcgggcctcctctgccaggggcgctgccatagtctgggcttaatgaggcctaaatctgtcaacagtggaggctgctgcttgtggtaaatatttggcgtccagctccatttggcatggttatatttgctccattgggggaaaaaataactctctgtttgccatggtgatggatttgtcgttctccaattagaagttgccagcagctgcaggcagaattgcttaatctgcttgtctgtccatccattcatccacccatccacccacccacccactcattcattcatttgttcattagctgacatcccgagatctactctgctagggaagcaagatgaacagtggaacccgtaagtcacaaactggccgcatggcccttggcttgtcatttccccctgctctgggcctcagtgcttctttccctaaagggcaggtccttgtcactgaactggtagggctgtggggaggcataaattaaacatctttaaaggacataggctgtgcattgactagtagcccaataaacgttgccggagactggatgtagtcagggagggcttcctggaggtagcagaccctgaaacagatgtcaagggaataagtagacacttgtccctcaatacacagatacaaaacaacaaacaaatgaaacaaagcagcataggtaagtgccataaattaaaatgataccaacctattaagacatgtagaaagagtgtaggaagatttccacaaaggtcagctggtttttactagaccccttgagccagtaaatgagccagcagctgtcacaggaacccctcactgtgatcagtggcaggaggttgtgactgttagagttgtgtttctgagcatttattggcttcatccagaattgtggtattttagacccaacctttatccttaggtttagatatttacatgtataaaaatgaaagtggataaattcttttttattattatttatttatttttgagaaggagtcttgctctgtggccaggctggagtgcagtggcgtgatctcagttcactgcaacctctgcctcctggattcaagtgattcccctgcctcagcctcctgagtagctgggattacaggcgcgtgccaccacgccaggctaattttttgtattttagtagagacagggtttcaccgtgttagccaggatggtctcgatcttctgacctcctgggtccgcccccctcggcctcccaaagtgctgagattacaggcgtgagccactgtgcctggccgataaattcttttaaagtttgtgtagaagaataagtgtctaagaatagaaaaattttctaaaaatagaaaaaccaaagaaagagaacttgtcttagaagccactaaatatgctctaaaccaagtggcacgaaagtagacggtgaatcagtggagtgattccactcagcaccgtgacacacacactgacggacagacgctgggaaggaatcacgggaaaggtggtttttccaatcagtggggaaaaatgtcagtggtccattttgtacttccaatggggggaaaagttaaggcatgctgtgtctctcatgagggagctggctggaacacggggttgggtctctgtgttcgagccatgcgccaaaataaattttaggcagatccaagacataaaaattttaaaaatccaaatattattagaaaaatgagaatatgtataaccacttcagtgacaaaaaactcatagctgccaaaagaaaatgtgggcacttttgagatgtaaaatgtaattgtttgtaaggcaaaaacactacaaaaatcagtgggtaaagtggactcacgacgggtacaggtgcaggtgtctgtccgtgtcgcgtgtctgcgagcctggaggaagtggtcccggctggggtgtttggtttggtttagccacctgggagtgggtgggagaagctttgtggtaaaaaataagattgaattttaataaagcatgtagggaggaagggaagggggagaaggagggagggaagggggtgaggagggatgaaggtcaggagggagggagggggagagggaaaaacagagggtggccctagcacccatcacctctttcccacttatctgtgacaatggttacctgaggatgctgagatctcaggcttttttttttttttttttttttgacacagtctcactttggctcatgctggagtacagtggcatgatcttggctcactgcaacctccacctcccgggttcaagtgattctcctgactcagtttcccaagtagctgggactactggcatccgctaatttttgtatttttagtagagacggggtttcaccatgttggccaggctggtctcaaactcctgacctcaggtgatccatccaccttggcctcccaaagtgctgggattacaggcacgagccaccgcgcctggactcagactctttatacttatttttcttctatgtttattcattactcaagcttttacagtgcatgcgtttgattatataaccagaaataaagccacagatctatttttgttgcatttttaaaaatggctgtagcacgcatcagtgctcagagaagaggcccagaggactgaaattaaactcaatattgataaataggagcaaagaatactgtggaaagaaaataaaatagaccaaaaaagggaaggctaaaatctggagggagtgagcagaagttctggagggggcccggctgcaagctgctttccctggggacaagggtggctcgggagatgcagccacactgtgaacctcgcggagactggggccacagggtcacgctgcctcggcacggcgacctttcgtgggtaaccattcatctgagtgcagacagcaaatttcagggctcaaacaggagatcagtacctgcttctgtacatagaacagagtcagttacacgtggcggaagagaccctggggctgcccagggcggtgaggcagcccacattagagctgggagcattcgctgcccccccagagcaaggggacaaagggagatggtgaggtccctgcagcctgggggccagggccacctagcaggaactagaatcagtgtgggccacagaggggatggagagggagaaagggagggatacccacagcctctcttccccctgctggagcctcccattgtggagtccggtgggagtcctgggccaggcagtcataggggccacttgtaagtgctcagcaggccggagcacagaatgggctgggggcagcagggggatgacggcacagccaggacgcatgtgttgcccatgagacatttccatgtccatactcacccgcactcgccactcacgggaggactctgcggtcgacgctggggcctccatcatccccattttccagatgggaagtgcacagcccacagggggctggggtgaaccaccaggaagaaggggccttgtggggcgaggaaggccacgtagagtgggatggaaggagctggtgttgaggggaagccattctgctgccaggctatgccccatctgggctctggagagaaggctggggtggttcagcctccaccgcccaccggggctgtgttctggggcttggggacccactgaggataggctctggctcctgtctcaggaggggccctgacatagggggttgggggtggcccctttgccccagctgtccaaatcacaagctccacaggcagctgcttcaggggcacgaaattacatctctctcaaaatacccctttctttcttctaattgccatgagtagaataatcccactctgtcttctctctcacccttgacggtgaatttaatttaatagactgtaactgtgctgcctctgatctttaaatgccatgtttatttgcctcgttagaatggactcgatgattggagaaagtgtggcgatgtcttgtgaagtgggttttgacctgcgcgggtttcggcattgctgcctcggcagtcccagattgaaaccgatgtggatgcaaacgccttcccttcccgtcgggtggagcggccggcggggctgaggctccctccgctgagtgtccgggtgggtcctgaactggagagtcctgcgccggcccccgattcggggtgagcgccctgccctccccagctgtgggcagccttgtccgtgtggtgtcctccgagctgacttactccaggagggcgccctgtcctgtcacccggccgtcagggaagggcactcctcacacaccaggttggccaggacagccgaggttaaaacctggcttcatggtttcggccagttccaggtccccagaggacagcggccatgggcagtgcagccagggaggggcagtgccctgttctgtgcgcggcatgtccaggaaatgcgaccccggggccagcggcttgttctgtgcgcggcatgtccaggaaatgccaccccggggccggcgccttgttctgggtgcggcatgtcctggaaatgcgaccccggggccggcaccttgttctgggcgcggcatgtccaggaaatgcgaccccggggcctgggcacgtgctgttcgccttcccagatacccgcatggaccgacgcttgcgcatccaggtctctgctcaacgtcagagtggagcctccgggccactctgcacccaacatcatgctctgtcctcctttattcacagcacattggccgcctgacttcacactttcctcctttctaacatctgactgtcccgtagtgggcagcgccccgggagctggttacctaccagggaggttcgaggccggaactaggtcccctgctttccctgtggtggggaagagaaggccacatatggtccccagacctttctgttgtgggacgtccactcttgacactatctcagggcggaagaggatgaatgagggagagaatggctcacacagaaattcagagacatgtagagaaggacagatcaagagagacaatgacagactacatccacgcagagccctccaagtcacagtgagatggaggaatgacacgcccagagacatggacatggagaagtacagggacagaatgacaggccagacagagagccaggtctgtgcagagagagagagaaggagggagatggatgggaggggagacacacacaaatacacaactagagagagggagggagagagagagagagagtgagaggtacacacaaaaagccagagatccctgcagagagagagggggagggagagaggggcggggttggggagacacacacacacacacacagatacacacacaacttgggggagggggggtggagagagagacagagaaacagagaaagagacagagcaacagagagacagagacagaaggcccaggggttgaagagagagtgagcctggggtgggggcagagagatggacgctgggtgcgtgtttctgcagagctggcctgggcgtggccccgtgaaggcctatggtacctctgggggctggggacaggtggggacagggctgggtgaaggctgctgcagcttgtttcctcctgttgctgagaaagcagctcctctggcttccccgtctggaattccagcccgtcagctgtctgctgcccacccagacgctcagatgcagaaaattcaggcaagctttggcctggcctgtttccagttaagactctgtcttcaggggggaaatgtccctaatggaaaggaaaacagaactgacattacccagggcccaaatcccaccctttctccctttgcaggtcctggaggggcacgcgctgctgtgggagacacggtgccctccccaggaggcagcagtgtggacaccgcaggtctgttcctgcgcaatacacagacagcacactggtgcctttagaatagaaaagttgagtcacattctggaatcaacctagttaacaggtcctgggatctaggagaccacatcatggcagaaacagatatcagaggtgagcagttctccaggcggtgtcgttaagggagagcatctgagaggctcgcacagtcactcatcaacccatcagccatgcccaaggcatctctgtggccgcatctcgaagtccagcccagggccaggctcataatagctacccagtaatggtgggatttgagtttgatcaatggttggaagaaaaagcaaggaatggaaggagggagggagggatggagggagggagggaagaaggagggaagaaggaaggaaggaaagaagggagggagggaggagggggaagggagggaggacagtcactgaaggaggcaggtaggaagtgtccctagagggctggggtggccaaccagcaaggaacccttagtgccacgggtgccactcactggtctacagcatagatcctccggattgggcccctcccccaacctcaggcccccagactccatccttaacctctacttccctctggctttcaacaggcaggacagcagagaaggcctgcccctccccaccatacccctccccgccctgctcagtcccatctcctcctcactcctgtcctcgtgggaggagtcagccgcctcctcactatggggacctctgcttggctccactccctcaggtgtcactgtccttgtgtgacccccaccagtggacacatgggccccttcatctctgtaaggccagaaaccctgcggagggcagcttccttccaaagcccaggctgccctgcgggccctgcccctccatggccttggagccgtatttcttcctttttcttggcacattttcacacctccctccaggccgcaggggaaaggagaggctgtaggaaaagcccacatcattgttcctggaatacaggaggtgctcaaaggaccataaccactgccttctctgagggcagaaggagagggtcgcagcctgaagaatcagacagacccaggtacccctgcctcacactactcgctgtgggattctgtgcaagtcctttcgcctctctgagcctcagttttcgaatctctagaatgggaccgtatgtagccataatgtgagagagcgctacagaaaataccgtgcgctacaggtgtcagttacacattagactgggttattgccgtggatgagtggaagccatagccacagccccctggctcactggtcaacagctggcaaagcacctgccccccaaccctgcagaggtggggctgctggaagaagctccccagagggaaaacggggcttcaccttggattcaggagtgagggcttggcagggcctggagtttaggattcacctgcagcccagccaggacacttggctcctaagccaggccagagccgggactgctggcccccatgtggaggttggtccacagcctgggtgctggggagccaacagagacccactcggtagaaagggggcaggtcctgctggtagaatgaggttccctggccctgaggactcccacgtgcttccagagagatggatccctgcagtaccccaaacccagcgttctgcctcccacctgccccagatcctcagatctgtggctggaacaatcaattctgcctgcttgctaaatgacagccttccttgggaacgacttaactcgtaattttcaagcgcttaaaggcatcttgtcattatttaactctcaaatgggattcttaagaattggagaaatacgttctgccaatttccccgcctttggtttgcttgcctggagagcagagcgcattaagttattatggtgctgtggctggaggcgggtgacgtggtcgtgcagagactgaatcagggctgtggaatgtgggtggctttccccgtacttttactgtcatttgttgcctttatggagcctgtttgggcatcgtgcgtgcatttcagcaaactttcactgactgcttgggctgggagccgaggacacaggtggggccagtggacagacccacaagctgcaaggggtggctgatgttggaagctggagccgacagctccatggcatgaagcgggggccactcagcaggtccagaccaggccacagctatggccacctgacttgtgaccagggttgctgcgtacagcatcgaaggaaggaagacttgactaggtggttcaggcacccttgggtgggcctggctcacacctaatacaaaacccaaagggagctgtcagcaattggtccttcagggcgggaagaggctgctgctgcttcctggggtgtggggtgaccagacaccagcactcctgcccctgggaacctgacactgtagaggggcagacagataatagcaaaacaaaatccaggcctgttgtcaggtagcgatatgtgctatgaatagaggccaagcagaatccctggtagagtcatggcagggctggttatagagtcatggcagggcagacactggcatgcagtgaggggcttcccacggggtgtctgggaaggagaggagcacacgcaaaggccctgaggtgggaccctgtgtggaggtcacgtttcctggggtgtacaatggacagtgcttaacttgaagcagtgatgttgatgacaccatgaggtacctgccaaccagggacacccctgtgagccttggtgtcggggtttttacttcaggtcagtcacgtaggcccatgtggctgaccttgatctcagcccctccagaggtgaggctgtatgccaggcagctcagggcccccaccatcaatgggactgctggcatagactgtccgcatggcctggggccctggtaagcaaagctactcttaactggcaggatgtgtccaagggctcagaggtcaccccccaggaatggtcaggggccagccagcctttggaatgtgaagggcatggacaacccagacttgtggcgttagttaaccctttactgctcagctgccagaggccttctgcttctgggagggatgggcaggaaggggacccaccacatcccagccagtcactgtgtggggacgctccctgcctctcaccctggagataactctgagtgggaggcgtggctccctcctctgtacagaagggacgcctgaggtccagtgagtacagtggccagctcaaggtcacacagcttgtcaccatacttcctccacgggagcctgacatgggcctcgggcacgcacggctgtcttggagtaatatcattaaccatggaggtgcccagtgggagactgggtcaggggcggatgaggccttccctagggctggccacctgctggggctgggcagggcactggagcaggtctgcgagctctgctgggtggccttgggcaagctggtaccttctcagagctgtagccttggccctgggccctcccagcgcctggcacgagggctcagcgggcagccggatggaggaggaggagcagcttcctcagcacattgaggaggcctggacaccgtccatcctgctgacttcccaggctgtggggcagatgctgccgctcggaacccacccgtgccctgcagacgtaagcctttgctattgattgcttttctctccagcagcattcacggaccagtttctgctgcatgcaaggtgggggtggggctcagtctgtttcatcatcttgaccataggtcagagtggggaatgattttcacatctgccctgcagctctctgcctaacacaggctggagtagccctggcaaagaaacactgacctcagggccaggagacctcagttaagatcacccacggggctgcttggttgccgtgtcacctcgagcaagtgactccacttctctgggcctgtgtcctcactcatgggaggggtccaatggaggcccagaagtctcaagggtgctctcggctctcgcagcagggtttaggggctgggacctcaagtgggcgttagcagtacccgtgatggtgtctgggtgggcactgtggtgctcattcatttattcattcaagcattcattccacccgcatttaccggtactcactccatgctgggcattgggctgagaggtggctagagagctggtcagatgcagtcctggtcctcctggagctcacaggcagctccaaggagaggaaatccatcaatgatgagacaggcgtcacaggtcatttcaagcatgcagaaagggaatgagaaggcccagctgggcgtggggagggacggcaggcctcttgctcttgttttcaccttcctaaggctctgcctctcctctctgaacctcccttccctcccatctggcctgttgttaggggctctggcttcatcctgaaggtgctgggaccctgcaggttgttcagaggctgatttgcaccacgtgggaggagaggcacctagagtgggctgaggaacagagaacgccgggtgtttggctgttgcgtctgcagattttatccgcttgcaaaacacagttccatgtgggcagggacctggaggggtgggggcggtgctgcttttccttggtggaatgccctggcctttttatgcaggacaggcgtcggggctgcacggagtctgggagtgtggggagagggtgctttccaggaacacggcatgaagttcccagaaggaactgggccacactcatcccctgcctgcagctgaaccaggaagggagcctccccttctcggcatggtcctagctgccgttgaattgtcactctcatccacgtttgcaggtacaggtgtgagaagtctcctccctcatcatccccttcaggcagcagctactgctgaggagttggggccgcatgttgtgagggccccattcacagcttgggagccaggctgcagtgttcaagctcagcccctctacctcctccctcctcctctggttggtgagaatgtgctagtcctccggctgggtgttgaagggactcaacgagctaacgcgtccagcatacccagcgcttggaagtcgacacaggcgtgactgaggggatttgtcatcgccatgattactactacagccacccgatttactgctgtctttaggagttttctgatcagacacactgaggacacgcatggtgattatgtctgtgggtcagtgttagtgttagctagtcagtgttgccgttgacttatcccttgttttggattccataacatcttcccactcaaaactttcagccgggtttccacaatcgcacgactcgaagcatcctctaagctttccagagaggggcagttgtttgtgttaattgtgtcttatttcctaatgaatttttgtatcttatatgtaaatattatcatgcatgttttaaagtagaattccctttcagatggctctgacctcatctacttgtgtcttgggcattttttccttctctttgaaaacactcaatacgtcatttggactgccttcagcagaaaccgaatacagtcaacagtgcctcgaaaaatcagtttagagtgtcagattctataatctgcgaactggcatacgaaaatgttatcattttgttccaggaccccctaagagtaaacggaggctctcctttgaaaaatattgagttgtaagagttacttggatctaagaagacattttttaaaaagctgcatggaggctcagagcatcccactgatgagcctccctcctagagcttaaccctgggaaattacccaggacacagaggctggggaggagttaaaataatgaaaatgttgttcacgaagggcaccattgcttgtcacagcaatgaagagaaaaaagtggatttccaccacgcacagcacgtggtaggcactctgtttgcagaacagatttgaaaaagttcagcctaaggaatgacctgtcaataatgccacacacgctggacggaatattacacagcaggcagaacatgctgagtattttgtgataaaatcagaacacaggtctgtgtgtgccttgtaactgaaatactgcaaatatgctcacacagggaccagggctagacaggaacagaggaggcagtggacctggtggatggttaaggtgcagcttcttttcttcttcttagcgttgttgttctcaattgtttcattatttttaaaggattccaagaagaactgaggatacattagcgtatcaggaagggcatttattgatcgtatgtggattgctacgtttctatctaagatagattccaggtcacagggtgggttaacccactgggcttgatctcaagcccagtctctggtctgtaacttggcggctcacacgcaccctctttgggcttctccagctctgccctgtccatcagcccgtcccacttcactcctgctgggaattcctaggcaagtcctctccacagaaggcagctgctgggtgcaaaagttcttttgctgtgtgtctcgtggggactgcagagtccagctaattccattgtgttgttctttgcctcattctatttgggtctcctgtttgaagtaacactctgggttttagagtggtttccatcctcccaaataggttggttcctggggacaacgtggggccagtgtgactcatgcccagcagcgggagaaagaggtaactaccctggtccattcacaggaggtgctcgtgtgtccttcctgaccaagtgcaaagcgatgggcaagtgccggttttctctcagcccatgtgtactctccaccatgtcaggccagagactcacctctacctggccataaactcagcctgcccccccggccccccatcaaacgcagcttcccccaattaacccagaagtcgcgggctgtgtccggatcatcggacggctgcttcacagtgaggaacaacacagtgccaagtacagcttcagcctcgcacctgctgcctgtgggagctgccaaggtaactggcacctccttcacccatacctgctgctgctggcagcctcgggcttgcaggctctggcatcccagctggctggcatgggactggagggtggctctgtcacccgccgtggctcttggaagtgtgcccggcggagggctcgcagagcagctgtagagcaggcatatctgctggaggttgacaaggctctgcatgccgaggggagcaccggcagctctgcctgtgccgggagcatgaccagggagcttccaggagctcggcctcgttcaccgtggatggttatacacaaattctaaagactccatcagttgggacaagagccattgcaaacatcccaccttgtgccattttaagacctccagacataaaaccagcgagaaccacaatgccacttccctcccacagagctggaagcccacagcagatgcatagtttggaactcaagtcaaatagagtctcgtttcatcctttctgaccccagacaagtgagttcacgtcgtgagtctcagtctccctgtctgcacgggaacagctggaatggggattaaagaagcaacccagccagtgtctggaagagacccagcacgtggcggccacggtgaagctgtgtctgccattttcaccttccagcgctgctgcctgtgcctgtaaaacttggctgctcatcacctttctagaacttctgccctcatcccttcattgctgctggcatggagcaacctgcttccttagccagcactggctgatctcaggggaggtccccgcagcacccacacctcttagtctgacccattctgcccctccttccccctcagctcctgcagctccttggcccggcctcccagagggcgcacatgggggcttctgccgtgctagagcagcagctgcatttcagtggtctctgtgcctgctctcagccccacaggatcctgggctcccctgttaagcaggcggggcagggagcatcagtcacttgtaaaggagctggggcagcctggagttaggccccagggctcctgctctgccagttccaggcttacccccttcagtgctggcccctgaggaggtgccgggtcagcctggaggaggagagccctggtgatgagggcccttgggggctgtagggtggcgctgttggctgaccagggtggactcacttcccagtttgagccactcgtacagttgcacggcaccgctggctgcagaagttccccgcccagccacgtgcacgcctggtctggatgcagcctggcatcgcgccgatgctcaggagaggtctggaaaggaactctggcactggaggggttcagttactgcaggagtttatagatagcgagggattcgctgaaaaggaccaattctcatgcagtcagtgagacacagttggcgaagagtaaattgaggaggtgtgtgctggttttccgtgggtcaggtccgaggtcatgcccctatttccatccctaaggtgtcagtaaaagctgcaggcaggggcactgatggtggaggaggggtcctctgggattgcgcccagcccagcttcattctggaacgatctgctagtgagtgtcacagcccccagcaccagtgggctcagaataccagcaagccgtggcaggcagctgaacccacatgtggaagggctggttgggagacgcggctcagggcgtggatgcagagaggtgggcacaggcaccgggggtggccctaggggtgctgcccctgtgggttcagacacagaaaatcagttgcctctgttgccgccagccctctccgcccacagggcacactgccagggctgagtctgggggtgaggtggagttaaggagatgcccaagcccatgggtaacgcacaggtgaaatgacacagctcctgcactgggtcgggctgcagtcaaggtccagctgctggcattggagaatgtcagaggtgcccaggacgtgcagggtgggtgccatgccaccccaacccctctggggcattggtgcacggatcaggggacagcctgggaagctcagagaagacaagcctggagccactgcgtggcccaacactgagttttctgatgttgctataatcttgggcgagttacttaatgttccttgggactcagtttcctggtcagcgaaatgggaaggtgtcctcctgttctgaagtgatagtaaggtctcggtgaggttcccttcactctgtcctctgctggtgtccagagcatggtgggcaatgatctcgctaactcctccccaaacagctttcgtgctgaagggcatcctgctctctccctgtatctctgtgggtcgtgggttcagatcctgctgccttcgctgctgcgtatttgggtgacttgcctggcagggtctcctcgtccctaacactgggcaccccctccggcaccgggctgcacttccttcccctctgttcacccacctcgctggcgcctgatgccccctttcacactcagaatctggagcgccttctggaattttattgaacaacttcactgtcccacaattgccctgtgtcaccttagttccctcttcctctctgatcctgggagggtttgttagaaagtctgggtacctcttcgcgggttctgtggagccatcgggtcctgggcgccacagcggtctgtgtgtcttctcatctcacagcacagacctagcctgaactggaacgtgaccgaagctcagaatgaattcccctgggaaaacacatctgcagcacctgtcacctctgctgagactgaggttccagtctggggttccctttgggcaagtccctttcccactgggcctcagtttccccatatataaagtgcaggtgtgaatacatgtaccctcaagaggggttctggggtccactcaaggggccttgcagctgccaagtgcagaacaggtgctggcactcagcctcgcagctgttagggacacagcggctgcgtcttcaagcaaggggtggtccatgccgtaagcaggggacaagctggagcacaccggcttcccttcagtggcacagtgacacaggcagtgccacctgcccaccactctgttcctgcttcgtgcatgttctacacacacctctggaatcctcaggacaggcacaggaggtccgcttcattaaccctttgttcagatagaaaaaaatcctaagtctcagaaaggtgtaaaccttgcccaaggccagagcttgcaggcgggtgctgcctttcacacctgcgcgtgtgacttccgtgttcgcaagtgggagtggggcgagcaggggctcctcaccctgaggaggaggggtgggcactgcacatacgtccccgccaatggagtaattataggggaggaaaatggcttcattaaatcatttttaagaagtgaatatgtacaaacactcagcagttaagcagccgatttgcagacagcaattttccaactgcgcttgccttccatgtttctatttgcccgtttttagactctggttttttatttttaattggaataaatgtagattggaatgatcagctcctgagttgctgggtgcagttaaagaacttggtgatggtgcagctactgaatgctggggaggtcacctgcgggacggcaccaggcacagagagaggaggcgctcagtaagcgctgtcgtcctactcctctcctgcctcttccccttccccttttccctccctcctcctccctccttttctccctccttctttcctcctccctttcttccctcttcttcctcccttttcccccatccttccccttctcccgttttccctccttccttcctttctttcctctccctccttttcctcttccttccctcctttatcctccctcccttcctcctcccttttctctccctgtctcccttctccctccctcctccccccacttcttcctcccttttccctccctttctcccctcttccctcctccctcttctctcctccctcctccctcttctctcctccctgttccccctccctcttcccccatccttccccttctccctttttccctccttccttcctttcttctccttcctcccactcttccctctttgtcactccctccctcttccctccctcctccctccttcctccccttctctcccctttccttcctcttcccatttccctcctccctctgcctcctccctctgcctcctccctttcttccttccagacaggctgagttctcccagggattttgacaccatccacagattctagggagaattcctccccagaagggcaggctcaggagccactaggaccgctaaggaagatgtacaggaattcgatccacgagtgtcagtgctagtgcttagactcaaatactcaaatccagttcccacatgttcagcgggaaactgtggcccagggagggaaacctgttcacctgaggtcacagagccttcaggtctggcacccagagcacctccaaaggaatccaacaagcatttattgagtgccagctgtgtgcctggccagtagaggcttgcgtccccactctggccgggagatctgtgtgggcttcaggagggggtagtactgggtttggagttgatctgagggtcctgtgctctggtgaactgctaagagacaggcccagctgtctgatatggggtggtggcagcaccccttccctccctctgctcagtccaccatgagccggggcagcaactgaatgggccacagcatccatcacactgaccctgctgaccggccctcagtgtccctgcccacaggccgctgttatgtgattggactatcgacccctagctgcgtccaacacccagcactgagcccggcgccccgcagacactcagcccgtcactgggggtcacacaggcccctcactgctccaccgtgttcctcgaagccgtacacttaactcctaccatgccctccagtggtcccagcaagaggccccctccctccttgggcccctggggcttcccactggcctcaaactcttcctggggatgacgcactggaagctgcctgtctccatttcttcactgaaaaccaggagctccccaggggattcagggagatttaatgaagtaggcaggtgaggtgctaattcagagtcttcctcatgtagaatagaagctcagtcagtgcaactgcctatagagaggtgaatagagtcgcccccaaaatctctgtccaccaggaacctcaggggtgacgctattgggtccagggcctttgcagatgtcattagctaaggatagaggtgaaatcagcctggctttagggtgggcactatatccaatgtgaaatcgaggcagagagtggcgcaatgcagcctcaatctcagggacgcctggagccctcagcagctggaagaggcaggaggatcctcccctggagcctccagagggagctcagggccctgctagcaccttgactttggacttctgacctccagaactgtgaggggacaagccacgcgggttgtggtatttgcacagcagcctgggaccctaacccatcacctcaactcacgccctggccctgccctccccagcgcccctctagaattgccttgtctggttgagtcttgttgcttgcacaacattgaaaacacacaggaagaggtcaacaggctgctgtgggttttgttttttttttttcatgttctttgaaggagtgatgtttagagtttagaataatggccagataagcagcgccgccgcccttgttctttccccaggaaaggaagtggggtgcggcagtgcctccttaaccgcatctctcttcccaccggcctggcctccgcagcaccctgagctgtctgctggagtcgggtggtccccctccccaccccgccgccactgcttgccagccagtttcaggttttctaaccacgatccaagagtctgaactcttccaagagtccaagcttggcgagtgcaccgcagagagaaacatgctccccatagaaagacgagggcatccatcattgaggatcctgtcccccgagcacccctggtctgcaacagaaacctggcaggttccagagagcgggagcttaactcgggtcctccttttctcggacacagcgcggggagaggcaaaggccgggcacgcccactgggcgttctccagctttgttccttgcaataaatcttcatcattagatatcatcatggctgcacttacttatctgagaagcagatgctcagaggaaataatgcagtgagagagagactcttgagttgcccaccaggaaaacacagtccgggcaagaggcttctgggaagaacggatccctttcaggtctcttgaaaggggttctgggaggctagacaacagggacacttgcggggtgcctgcaggttaaggatgtgtggtcacagccttttttgttgataaggaccctgaagatgcctgattccaatcctctgatgcctcaaagaagaaaactaatgttaaaatccacagtgggctgcccagggagcagcagtgggcggacatgagcccagaccccccaaccgtgcttcacccgggggcagtcctgactcccagcccagccctccaccttcccccaagcagcatggcacctgagcagtgtcactccatcttccatgtcacctggtgtcccctccttcagcctgacacctcgggcagccccaagtcatgccaactccacttcctgggcctacatcctattcttcctctcactcctccacctcctcagtcacctgtccccaactcagtcacctgtccccacctcagtcacttgtcccttcttgcagtcacctgtcccctcctgcagtcacctgtgccctcctgcaatcacctgtcccctcctgcagtcacctgtcccctcctcatacctgttccctgcagtcacctgtcccctcagtcacctgggccctcctgcagtcacctgtcccctcctcagtcacctgtcccctcctcagtcacctgtctcctcctgcagtcacctgtcccctcctcacacctgtcccctcctcagtcacctgtccccttctcagtcacctgtcccctcctcacacctgtcccctgcagtcacctgtcccctcctcagtcacctgtcccctcctcacacctgtctcctcctcagtcacctgtccccacctgcaactgcagcactcttcccaaacagcagtaatgatgagccctgctatgcaggtgccacgacccaggcgccattcaggcagattccacatggtcacttgctcatctgctgggaccgcattttccaggggtcacgtgcccatccactgcagagccccacaccttcagaagacgcccatcgccttggcacgttgtccagaccggcgtgtcccttaggaatagaatcggagccattggggtctttctaaatgttctagtggccacattaaaaagtgaagagaaacaggtggcatggaaaagcgtggaaggaccttaatgctatcactaagcgaacggaaccaaatgaaaaggctgtgaactctaggattcctggtagatcaccttgtggaaaaggcgtaactatgacgatgataaaaggatcggtggttgccaggaggcgggcggggtgagggggatgaatcggcggagaacaggggattcttggggcagtgacgctgctccgtatgataccacagttgggggggccctgtcattctacaggtgcccagacccatagagttcaggagccccccagctggccctgacctgaactctgcactctggtggtaatgtcgcgtcagggcggcctccctcactgattgtaagagcgagtctctcagctgggggcgctgacggtgggggccgaaggtgtatggggatgctctcatttctactccatttgctgtgaacctaaaactgctgtaagaaataaagcctatgggtttaaaataaagaacaggtgaaattaattttaatcacagcttttaattaactcaatatatccaaaagatgatgtcaacatgtaatcaatataaacattataatgaaatattttacattctttttaatgctaagtctttgaaatcagtgtatatttcatagtcccagggcatctccattcgaatgaattcaccctatttctagtgctaggcggccctgcgggtcagtggtgctgcccgacaatgcgggtccagccctctctgtggccctggggaccgcccgccccacccacctccggccgccctgttgtctctcacagctcacgtggggacactgctcccgaaccagctcctacacatacctcggacccggctcaaatgcccacttgtggtcggcagagcaatgcctcccacagacgtccacgtcctaatccccggaaactgtgactatgctaccttacatggcaaaggggactttgcagatggattaaatgaaggatcttgggattatcctggattgtcctcgtggggcctttgtaatcacaaggagggagccagagggacgtgagactgtggtagtcggcgctgtgacgggaggctgtgacgggaagcagagtggagcgatagactctgcagtgggcctcggggcctcggggcgaggactgcaggaggtcgctagcaggtgggagagacagggcatgggttctcctctggagcttccaggaggtgcctacaccttgattagccctgtaagaccccctgcagactcctgccctccagaactgtagataatgaatgtggctggttttaagctgctgagtctgtgggcctttgttacagcagccatgggaatctcacaggcccccccaccaggtgaagtcagcctgccagtgtttgtgccccctccgctgagcctggggccctcatgccaggtgctccttatgcacagatgagagaggaagggtacccagactaaggtgagcagggagatgtaggggtggaatttaaaagctttaggaggaaatgtcagctggtcagtgctggattagacctggcagtgggggcagcctggggggctgaggatggcacctggaccccctcagtttgatgttccccttagcgtctcccaggactctctggacgtgcctgttggcatcgctgctcccggctgcagtgtctgtctccttgtgctctctctgtctctgtctctctctctgtctctctctgtctctctctccccccaacaccagccagcctgtcacccccatgatagcagggcacagtgtccacgctgcccatggattccagcctcagtgtagtgatgggacacacagcaggtactcagtatgcacacatcatgtgaaagaatttgaatgagggggtgaatttgaattcctaggcccgtagtatgggccttaaagcataaaaatttaaacaaatggaatgaatgggtgagtgggtgaatcaatgttcctagtgtctgcaggagttggacttgggagtcgtggatatctgaggaattgggtttgcattgtctgcagggtgaggggcttcctaggcactggcagctgctacgtttttttttttgttgttgttttttgtttgtttgtttgtttttagacggagtcttgctctgtcacctaggctgtagtgcagtggtgcgatctcagctcactgcaacctccacctcctgggttcaagagattctcgtgcctcagcctcctgagtacctgggattacaggcgcctgccacctcgcccggccaatttttgtatttttagtagagacgaggtttcaccatgttggccagtctggtctgaaactcctgacctcaggcctcagcctcctgaagtgctgggattacaggcatgaggcgccgtgcctggcctggactgtgttttaaatggacctgacttccttgtcctcagggcccttgtacctggaacgcagctgccatcataaagtaccactgtggcgaactctctctcggggtcctggaggtcagaaatctgagagtgtttttttcagaggctctgagggagcctctgccccctgcctctctcccagcatccggtggctgcccaggtccttggtacccttggcctgcggccacatcacctcactttgcctctgtctgtgcgcggccttctctgtgtctgtgtcccaatttccaaattcttataacaccagccatacaggactcagggcccaccctcacccagcatgacctcatcttaactaattgcatctgcagagaccctgtttccaaataaatccacactcatgggttctgggtgcacaggaatttggggaacactactcaagcccgtccaaatgcctttccccagccaggcacaacctctctccttccttccagactctgtgcaaacatcaccttgtctaaggggactttctaccactctgtctgcaacccagcggccccaccacccctccctcaccctccacccgcacccctacaccgttgattcttcttcccaccctcatcacatttgatgctgttgtatttttgcttctttccttatcgtccatctgcctccttccatctcccctcctagaacagacgttcctagagagcaggggctttgctcatgggctcctagctgcaggccactcctggcaggagctctggagtttgcaggtatgagcaggctcctctggcccagggcggggagcaggactgaggccaggctggatgctgggctaaggcgagcagagctgggagtgaagggaagagaggattgagaggtatttgggaggcgggatcgataggcaggtcttggagatggctcagcagggtggggaaggaaggggaggcttcccctgtgtcaggctcgtaaacacaaccatttgtttctgcaagggccttggaattttctgggtctctggatcagatcgatcctctgctaatgggcctctctctgcgtccttcccaaagaaaatcaattctctgagatttgagagtaagtgcgtcctaattatacctccactgggcttctttgttcactccagcctggtcctccctggggagaccaggggcagacagaggccagacaggtcctgaggccccccgccatcctggggaggggctggcccctgggagttagagggctgggggttgggggtctgctctttgtcctggcctaggagaaaccttgtgaccctgaggactgtgagggacacacattctggggacctgtggccacgtggccagcatgcccagagatgataaacagtccatttttctggagcctcaggttcacttgaagatgtagggaggaaacgtctccaagtagaaaccaccaaagatgtgttctagaagggcgtgaaatagctcccagtggggtggggcctttatgctaaagcagctccaggcctgtcccctcggcccccagaggacaaactaggtgagtctgagaagcactggccccacagtcaggccacacacgtcagtgcaggccgggctcagagccaggtgctggggtctgaggcaggagcactgaagcctggctccagcccaaggcccccttgcccaagctggagagttgcccccagtcccctgagctcagcatagctcagcagtgatcagacatggggaagccccacaaggcatgctgcccacgacaggagccccacggccgtgtgttccacccctgtgcctctccccaccttgggtctgtgtctggattctgcatcgatagagcaggggtgagatgtgaaatgcttccccgagcacctctgatcctctccagtacagtcggggcatatcctgcaatcccagtatattttaatggctgatgataagaggtgttggtttcaggatctctgggacttaatcttcaatggagaattaattccatatcctgatggatggatggcttccaaacaacagatatgaagttgcctttgtggcttatctccctcttcttgctgggcagccaaggcgctttaaagctcagtgtactctcagattctcacttggccaggagggccttgcccaaggaggtaccgagtggacagccctgtctcccagcacgagtccagcagatgccactccagggcgggcatagtgcttggggtctgatttccagcagctgcccgaactctggtacctgcctgcggtctcctaccatcctgtgctgcaggtggtggccagggtggaggatggggctccctggaggagctcagagtccagagagggaaagaggcaagcagataggccacaggaatgcctcggcacagccaccagcctgaaatcagacgggccagtcaaatcctgagtcagccacttattaactaagtgatttcaggcagtgaactatccctttggaggcttctctggtcacctgtgagatgcatgtggtaacctagagctgcccggctcataggaggcatgggggaggaatgactggctgggatttggagtcagaaggacctgactttggatcctagctctggacctaagctccacacctgtgtgagtcctcagtgttcctgagagagcccagtctcctctcctgccttgtcggcatacactgcccccaggcagagtgcccaggactgtactcagggtgtctggggcactcggcccgcacgggcacagggcaggggctggacaccgtgtgggctgacgaaggccacacttggagggtacatggctgacggctgtcccccttttcccccaggtcatcagatttcgggacgtcctacaccaagctcaccctccagcctggtgtcaccaccgtcatcgacaatttctacatctgcccgaccaacaagaggaaggtaggtgctggctgggggtggccgccactctggctctcgccttgtgccgctcactctgcagagcaaggaagctgctgccctgccctgctgtctcctactttggcccaggccggagtgtgagatgtttccctcccagctctcactgccacccttcccggtgctacctgacaccattctgtgctttaaaccagaggccaggctttggaggaaggcaccgcctgcatacctagggcacatttgtcttcccgctggttggggtgggggcatgcatccatcagagcacagcagggaggagctgtgggcctggaagcagagacagcagcagctctcttgggctgggagccctcggaaggcagtgctgagcaggcccgttcttcggaagttagttgttgatccggttttgattatgctatgatttccatctgagctctccttgctgtttcctgggtctgggggaacttcctgactttgctctctggctggctgtacaataggagagaggggtctttccgaggctacccaccgtgggttccgtgagaagagccctcctgcaaacgtgtgtttgtgtcctggcccaccccctgagcccagatcaaggtcggcagaggcaccagggcaaagctgtcctgtgaacctgactccattcagcaaagcagttcacggtcacagaaagggactcagaccagtgtttgcatcccagctcccctctctgtgccccagtttcctcaaatgggatgtcacccacacctcgcacagggaattgtgagctctaggatcaggcacccagagcccctgcatgatgctcggcatgaggtgggcacacaggcccctgtgctcagctctaatggtgactttgaaggagaaatctgagcagcttggagtctgtgagaatgtccatgaatcaacagaacatccagaaagggagttgtgcgggatggtgatgattccaagggtgctggagtgtttcgatggttgcgctggtggcaggttcacaggggctcagaggagctgggcgcactggagcttggcagcttctgctgagaccacaggcctggcagcagcagtctatggaacgagggggctgagatgcgtgcagccttgattgggccgtctcggtggtctcagccacgtttgttcatgggatgtcctctctcttcctaaagcaggttgctttgctgtttttgttttgttttgtttcgtttttttctcttcttgatttctgctgtaggagcttccagctggacagacttggaatgcagaggtggggagggctacagaggggaggtgagggagacctggccctggggacacgagaggcgcctgctggaaggccatgtctcggcgtgtagggaagagaggtgggttgacctgagccagcccctgcttcttcccagccccagccctggggattcacacacccgatctctttccatcccacagcagcccaaagagggaggcatcattatccccctttccagggcaggacattggacgagagaggtgagatttgctcagtctcacacctggtggtgcagggggcctggatttgaacccagcttcaccgagcccaaagctgagggtggagggtgttgtccaggcttggcagcagtgaggcctgtacctgctggaaaacccaaaccctatggaagcaggggcagacactctgccttccagcccgaccatcaccccttcttcctggggttgctgtgattcaaatttgagacaaagatgagtggctgggggctggcgctgacccagatgagggcccacactgaccccagattccagctggcaatagaggaggccacgccccccacctcctggcccagcttcgagttcctgtccatccagccgatctggtcctggtggccttccagcggctgcccttctccactccatgcaggggacactccgctcctgtctttctggtcaccagctgggagggtccacaggcacctgggatgtgatggtacctccagggtcagccctgcaggccacgtctgtgtttggaaatgtgaagggcaaggcaacaggggcagtaacggaaccaagagagactctgaggccctgaggtcaggcaaggtgtcacatggagactgggtcagacagtgtgaggtcagacagagctgcttctgcatgcagcaacctggggacatggccgtgacctccgctgagcctcagtttcctggcctgtaaagcgggcaggtggaagggcccatgagatgatacatagaatgcacaggggatcagcagaggggttcctaggcagcactgggccttctgtgcgggccaaaggctggggctgcgatgtggggtgctcaatagaacttcctctacaggcagcaccggggaggtatctgcagtcttgaaagcagacaagccctgagacaggttatttgaatccctgggcacaggctggatttcagagccaggagtttggacatttagcctagaaatatcactgcgggtacaggattgggtctgatggtggcctggcacccagcacagaggctcagctgactttaaaggaatgggatgaatgaatgagtgaatgaatgagtgtcacaaacagtgtgtgctgccgagtggacactgtagccgcatcaggtttgcctgggtgcagacactggatttgcagggtggtgtagaggacagtgcctgtgctggggagtccctatcctcagtccagctctgccaggtccccccccatcagggagccacaggtgtctcacctgtaaaggggacagtgatcaagggtgggcttgacaggtgagtgcctggcagagcctcactcaaaattaccatttactgtcagctgaagagaagcccccaaagatgtcccagtcccgacccctggaacgtgtgaatgtcacctctatggcaaaagggactttgcaaatgggattaagtggaggatgttgtgatgggaaggttctcctgggttgtctgagtgggatcagctcagtgtcatcacagggtccttgtggagggcagcaggagggccaggcctgcagggggagctgggagatggagcagaggctggggcagggcctggttggggccacaagccaaggaaagcaggcgcctccggaaagaagttggaaaagccaaggaaatggacttgccactggagcctccagaggaaccagccctgccaacaccttgccttcagctttgtgccctccatggccagaggaaaatgaatttctattgcttcaagccacggagtgcatggtgatttgttgcagcagccacaggaggctgacacagctgctgttttgaggaggggctgcaggggttggggctgggagtagggaggccgaggctcctgctctcccctcacccacattgttctgcccaccccacagccacccagatggaactggcctcccgtgggccctcctcctcctgctgacacaccgatcctgattcctgttggaccccaggtggcaggagcaaagtcacaggtgcagacagggctgggcttctgggtgccccggtttgggcctgttctcacctctccctgcccacctcctcaccacaggacaaaactgatctctctccggaaggccatgatcccctaggttggaggcaccaggaggcccaccaagggccttgctgaatctgaacttgttgcttccaaagcccctgatgctgcaggaactgctgtctcggaggcaggcagggcagttacggtgcggggccaggagtgcagcggatgtggggcaccggggagcggcaggggaatgggatgagaggctgaccccctggcttctctggctggggcataggggcctgttcctgggtctgagtctggccctgtagcctacccgctctgagaccttgagcaagtgtgaaccgcccttgttctgggcttcctcattggtgaaatgggggtagtagcagcatctatactgtaaggctgatggaattaatgaggtgctccttgtcaagtgctcagatccgggcctggcccgagggaagaccccatgagttactcgtgtgacccaccgttatccttagagggaaacactgacgccctcctggccagccatctgagactttaggttaggaactggctgcagggtgacaaagcctcacacgtgtggccccagtgggctgtgtctgttggagggaccacacatggccatggaacagaggcctcacctggtggctgtgccaggcatggggggcattgccctggccctgctgatctgcacccacctggttccctcaggcccgggtcaggctgcttgctcgtggcatgtcccgcccacacctctgtgtttagagaacaaattaattatcagtgatgggaaccggggcagcgatttgttatctaactaacagggcggcatatgtttccctgtgatgctgctggcagtgcgcttctgcctcaggagaatgaaacattggctcctgtctgcagaggtgtggacgggccacgtgctgagtggggctagggacgcaggtcagggagggccagagagcacgtggactcagaggccgagggcatcagagggcccaagctctaggcagcaggctccactgttccttctctagtggtacaaactgtaggcaagttcctaatctgcctgcacctcagttccttgtctgtagagtggggttgcggtggtgaataaggattacctgggttaatgcatatacggtacctagaatcaagcccggcacacagtttgatagtggtctttgcaacaagtgggaactcgggctgatttggttttaaatgcatttagatgctgaaaagccatagttacgattccacataaaacaaatttgactttacatgtcaagtaaggagtggggcaagccagagaagctggttaaggcagaagaagagactcaggaggtacagggctggtcttcagacacctgcatggtggtcctagggaacaagagcagcccatgactgtggggcagaggtcaggcgtgattcctccctactcctcagccgtgcacggcccctggcactcaaacagaactcacgagagaaggatgtgatgggctgggctgggacacttctgggaaagatatttcaatgtaatatgaagcaaaaatggcctttatcattgcatgaaacttatctacttggagtttcttgatcccttctgctaccccctcggtgatcatttttggtgtatcacactttcggccagaagcggatgtccccatactcagatgtggggggggggggcgggcagggcccacctcgaggtcaccatttgttcacttccattagccagagcagaaaatggaggctcagggaagctcggagagtcttccaaggtcacccagccggtagagagaacagaagcaatcactgacacatggtgcttgaacccaggcctgccagcccctagagtaccccttgtcatgctccgggctcctgaggcacccttgcagctaagttctagcaagctgatggggctccctgtgtctgcgcaagcacagcccggcccgcttggctgggggctagaaatcagcagctccttactgcacaccgggcgcagtctgggggctgctgagctgtgtaactctgggcagatcccatttcctctctgggcctcagtttccccatcccttagatgaagcagctgaattgaaggctctccaaacccccttcaagctccactatcctagcttctcctggtctcccagggcgatcctctgggaagagtagcagccatgaaagaggatgcctgtgggcagatcctgacttggctccatctaccctgtgcccaggccatcttcgtggtgagagggcagcttgaacggggtctctaagcccctcccaacacccacacccacccattcagcagaaatgggggtgagaccctactaggtgctgggctgtgtgcttggtgctagagagagagagccctttgctttgtccagtcttatagagagcagatacagattatgtacctactatgcactgggtcccttgctgggcactggggagcaaaggtgaactggacaaacagctctaaccttctagagcctctgagggtctggtggggccctgagaaactgaatctctctgctgcaagtttatagaaagaatgagaaaagggcggccggatgcagtgtctcacacctgtgatcccagcactttgggagcagaggctggagcatcgcttgagcccaggagtttgagaccagcctggccaacataaaaacataaaaataaaaaatagccaggcctggcacgtatggtcccagctactcaggaggctgaggtgggaagatggattgagcccaagaggttgagcctgccgtgatctatgatcccaccactacactccaggttgggcgacacagtgagacactgtctcaaaagaaagaaaagggggcaaagtcagcctttagccaatagaggattgacccgggtgactctgattgggaaaagatcactttgtttacaggggcagttgcatgagtgtgtgccttgccaggtctgcctctctgttattggataatggataggttttgcaggaagacgtgaatactattaggactccatttagcaacaattacaggccgagcagcactttatagcttcttggagaccactttgcaacctgtcttagggaatgaattcccttttatttttgtctcgcctgcagcagaatcagcagtccctggccttgctgctcctggccaggcagcctactattgtcatggctggacccaaggccctgggggccctgacgacccccacacatcccctgcaatgctcagatcagcttcgggccgacagcaggtttccttcccacttggccccaggagccctgtggcatggggaagtgtgaaggcacggcccagaggagctggcccaggcatggaatttcttccaagcattgtgttttatatgaaaaatttatgtgaatgggcatcttactccattatatatcagtgttggcttgaatattaaaatcacacacacacacacacacacacattttcaccaaaaaatctttatgtcaagctggtgatctgggagaaggccaagtcctgggacaccctggcccacccaccatatcacccgggcccttgaccccagatatgagaagcacagggttaggacaaaatctccctgagttcacctcttccctcattccgctcactcgcccgtgtcttcgtaggggaactgccacgtgttagtaagcactcaggactgagcaatgaatcaagtgaaaattttgtttttaagaagctcaaagtattgcggaaagtgaaaacctccacttggcagaggcggtgtggtcatgataaagcatggccctgtgtcctgaaggccttttatgaaagttcagccctgttctctaatctctacagcagccctgcagggtaaggatgctcatgggccattgcacaggtgaaagaaattgaggcccagagaggccaagttgtttcccccaggccccatagccggtgggctgctgaaccaggacgcgccccaggtctaagggccccatcagtgctgccctgtcaccaccccccaaagccttccagcagctctgtacagacaccaaaagcctgtgctttgggcacagggccctgccccccaggaggaaacctgagggatggggcacagatcctggagctgtggacccactaagacaggttcccaagttctctggacctcatagtcctcaccaggaacacggggtggtggtaccacctgctctccaggccccagcttcacaggactgtgccattcaggccgagccaagtcccaggctcctcttgaggctgtgcccatgtccgcttcctgtggactctgtgtgcttgccagaacacagaagtccagtactttgttctgctctttgtctgtgggtctctctcccacccatgtgtagggtagctggctggcttccccaccacactgggctctaatggctccctctccctccctccttgttttcttccttctctttgtctctcactctctctgtctcactctcttccctccactctgaacccctgccttcagccctacaaactccttcccagctgcaaggccccgacccccgttatggaggccccgccccttcctgctgtggaggccccgccccttcctgctgtggcggccccaccccatccctgctgtgagggccccaccccttcctgttgtggatgctctgcctccttcctgctgtggaggccccaccccttcctgttgtggctgctccgccccattcctgctgtggaagccccatcccctccctgctgtgggggccacgcccactccctgttgtggaggccccacccccttcctgctgtgaaggtctcaccccctccctgctgtgatggcaccgccccttcctgttgcaaaggccccactccctccctgttatggaggccccgccccctttctgctgtggaggccccaccccctgcctgtcgtggaggccccgcccctcctgttatggaggccccgccccctttgtgctgtggggccccactccctccctgctatgagggccctgcccctccccgcccctgcctctccctgcccctccctgcccctccctgcccctccctgcccctccctgcccctgcctctgcctctccctgcccctgcctctccttcctgccaactgctgacctcttggcccgcctagggttttccttcctctccttctggacctgagctgtgcatgatggtgctcagaggcagctgagattagcccgggtcccgtggacataggaccccagccttcttctgtggctaggaaaccctgtgagtcatgtactatgtccagcgggggatggcagcaccctgtggctgctttgccaccgcctgtgctttgtgggacccacactctgtgtgcagtagcttgggaagtcccagaatctgcccttgcgcttcacggctttgcccttaaggcgttctgagcagcgagagccaggctgcatggtcccatggtgccgagatgctttggcgctgcgctgcatcctgctgcgcagttcttcctcccgagggtctggccagcatcacccgctccccggcccacacatctgatgaagagagtcatgagggagggcgggggagacagagtggggagaacaggctttacggagactcaaccccaggttccctatttcctggctttccgacccccctgccccccgcaccccgggtgtgaagtggggatgaacattacccacctcatctggtcatgtggactgttaaatgggaggatgcctgactcagcagctcaggcctggccctggcaatcagtgtcgtaaagtggccaagggaaccggccagcgccccacccacgaggctgccctcaggtcagagccagtgcgtgaggcatgggggtacaatgccaggcacacagctggggctcagacaggaccaaactatcccttctgtctcttaccctggacctgccatctgtcatgaccatggactgacactcctgaaagccaacccatcctttctgtctccctgtgatgggaagtgagggtgagactggcattacacttcgggaggggagccaaagggtgccatgtctgggcctgggctgctgcagggctgccatgcgtgcacctgtggcctccggtggtgtaggggtgtgggcgccattgtggcacccttgcacacagtctcatccatggtgctcaagctcagggtgcctcgtgggaccccaggacctgggcacatgctggggctgccaccatcatgggaagccttgctaactttccattctgctggtaatttgggctgccagggaggattcccagtgctctgtatggacatgcatttgcaaattgagatcattctctgatgatggtctctgggcaagactggccatcagaggaggggtatccctagcctcctcaggaggggcgatcactcaggagccctgagccaggcttgcttatgggcagtggctcacagctgtggccagggccttgctcgggggcgcccaggcagccaggcctctccctcaagtggtctgccctttttcttgaagagtggacatcagaaccatctgcggacatggctgaaagaccaccttttaagcatcatgttgcagaccagaggcacagccaggctgagaggtggggagagtgtgcagggtcagcgcctccacacggagccctagtttcagccttaaacatgcagcacacggggcgtgtggacatgatggtgcagctacaccaaagaaaaacgcagatagaaaccaacaggaaagccggagtcaactgttttgattccaggactccagcttgaaggtctaagcgtggccagcagcaaggcagctcaccaatgagcatactttgggtgcttctggccccccagccatgtgcaggaccccctgccagctccccactttttggccccattccccttttgtaacaggggtgagggcaaggcaattgcccagcagagctccaagaccaggagagctccagagagaaggagctttgcctgcttcagccaaaccaaaggggcccattggcagcccctcctcctcacccctcatgggcggagggttggggggtgttcctgccccgcctgccctatcttaaacaatcagtgattatcaattattaagacagccctgctcctggggctgcatgcagtgctttgggctgaattgtgccccccaaaaaaatatgtccgtgtcataactcctcatccctgccaatgtgtccttctttgggaatagggtctttgcagctgtaatcgaggtaaaatgaggtcatttccaacatgactggtatttttataagaaaacgagaagagactcagagacagacaagacagagggcaggtgacacgaagacatatggggaagaggagagggccaggatgacagaggctgaggggagtgaggcagctgcaggaaggggaggccttggagcccacgacaccaaaaactaaaaggaaagcttggaatggattctctcccagagccttcgggaagcattgttgacaccttcattttgaactcacagtctcccgaattgtgagaggacacatttccactgtttgaaggcaccagtgtgtgacactttgtctcggaagccccagacgctgatgagaatggagtcgctcacgtgatcctcagagcaatgatcagcgatgtggttgcccagttttgcagatggggaggccaaggctcacaggggctgagtaatttgctcagggtgggtggctggggatccaggttcccacctgtgagcacagcactgcctcttacgctccacccacgcttcctcttccctcttaggagggatgaaagcaggagatgccagcccccttcagacactcaccggcccagtgacccacagggccaggccatttgcaggagggagaagatggtcctcttgatggaggagtggcctacatggacaaggagggctgggctggccagcacgtgtcagtggccagcacatggcagtggacagcccaggttttggggggccttggaaaccaggctgaaggacacaggatggcacagagccctggaggcttccacatggtgggtgatgagatcacatgtgctggttggttggtttgccttttaagaaagtccacttgctgcagttgggagacaaacggggtgacagagagtgagaggcagggagggtcacccatccatgcatccctccgttcatctgttgactcattcattcatcagtccactaattcattcattcatctatccacttatccatcctcccacccacctatccgttgattcatacatccacccacccatccatccatccacccatccatctatccatccatccgtccatccatccactcatccatccatccatccatccacccacccatccattcacccactcatccatccatccatccatccatccatccatccgtccatccatccacttatccatccgtccatccatgcacccacccatccattcacccactcatccatccatccattccatccatccatccgtccatccacccatccatccacccatccgtccatccgtccatccatccacccacccatccatccatccacccatccacccatccacccatccatccatccacccatccacccatccacccatccacccatccacccatccacccatccacccacccatccgtccatccatccactcatccatccatccatccatccatccatccatccatctacccatctgtccatccatccactcatccgtccatccatccacccatccatccagccacccacccacccacccatccatccatccacccatccacccatccacccatccacccatccacccatccatccatccatccatccatccatccatccacccatccgtccatccatccactcatccatccatccatccacccatccatccatccagccacccacccatccatccagccacccacccatccatccacccatccatccatccatccacccatgcatgcatccacccatccatccacccatccactcatgcatctacccatctgcccatccatccactcatccatccactcacccatcctccatcccttcatccatccactcgtgcattcatcatgcatcaacttatttattcattcaactaatatctatcccatggccatctatgctgctgctgacacctgtgaggtgacatcaaggtgagagatgatgaattggtgagcagggacagggttaggatattccttgttgattaggtgatgtgttagctgtgggtgaaggggatgctgttccctgagatggagagccctggagagatggcagaccttagtgggagcatatggaggctctaggatgggacaggcagagttcaccagcctgagcatccaaggcaacatccaacaggctcagggcggccagcaggaagaagagctatatgtgccccctgccattgcagattccaggggtgagctctcaggggatgcttcctccagcctgggacaggctccctggtctctttcctggctccaccctgaattctctgttcagctcagcacaaaacaagagacagagggagctggggtattgaccccctagctatgggtgagctagttcagggcccttgcaggctctgagcacccacagctccctgagaacgaagccaggctcctggaagtcacctgccatccccagtctcccccatggctgaacactcagggtgtggctggttcctctgagggctgttcctgtgaggggtgggagcccctgcctggtgggaacagaagcctgagtgtggagccctgaggagggctgggaaacagagctggggctaaatgggccatcccttccaatcagcgatgttctccatttcccttgatagccaggcagcctcccctgtgcaggagaaaaatggctcaattgggcttgttggtatacagagcttttgtctcagaaatagagtgaaccctggaaacttcagccctaatacatggaaaattattccctcttaaagtcaataggttattgtaggagaggagggaaaagaaaaaaaaaaaaaaactcgagcttttcagaaaacaagtctcctgaatctcctgcccctggaactaataaaacagagaggaagggactctggagttcctccctcttctgaagagcatgcagaactgaaccaaaacaccagagccaaaaaataaaatagaaagtgcaaaggcccccaggctcaggggcacacatacagaggtcggggagctccaggcctcttcctcaagtgctctggggacccacctgatggagacttaccatgtgctgggtgctgagctcaatggctcttcacctgtgtcatccatcagggctggagggagtggcagggggacctaagagagacagggacctgcccatgggcgtaagcagcatcccccaggacagtgactgtggccaccatgttagagacaagaacacaggctcaccaaggctcagggacccattcaggatcccaagtcagcaagggactgggtggtgagtgagatttggacccacgactctctgagacccaaacccagacccaccccgctgcatcagcagactccaatctcaccccacaggccctggagagcctggtgtttgtgggcacctgcctgcctttctgtgatttataaagtaaaccttctgctgcctctgtcttcagggaaaaccagagtgcacgctctgcctccgtcagctcggatggctctcacgaaacactccaaactgggtgacttaaacaacagacatttatttctcatagctctggggtttgaaagtccaacatcaaggttccagcaaggtcaggttctggtgagggctgtcttcctagtttacaggtggctgccttctcgttatcttcacgtggcagaaaaagagctagccagctctctggcctcttcttaccagggcactaatctcatcacaagggctccaccctcatgacctaattcctcccaaaggtcctgcctccaaatcccatcaccttgggattaggggttcagcctgtgaactggggaggaatacaacattcagtccattgcagcctcctttgtccagaccacttttcttctatcgtgggaggtgggaggtcacgttccagcaacagctcagaggcatccagggaccaagcctgggtcacccagcaaagccaaggctcaattcaccaaggcctccctccaggtcctgtgtcttctccccttccccggcaccggcggggcttgctagtggcaaagctcagcctgcccagagggaggcctgctgtgggagggctctctcctcttctcctctgcgctgccccccacctccctgccatctttgcctcaatattgcatgtcggctccatcgcagtgaggaatccccagctgtctcagcccacagtaaacaataaatggtgctgtccttcaagcgggagaggaggtgacaggttcattctcttgttcctgagagcagctgagggaacccacgtgtgcagggtgaccgtgacacctggcccccaaggtcatcgaaggtcagaggtgcagccggtgatggtgggcccctgcctcctcatggggacgctgccgtgggattcccacaagagcacgtgtagcctgattccattttccaacactgtggtcacgcagcttccctgttaagcaagaagtgggatttaagggagctccctctgataggctgtgcttgccgtagccagaatttcatccctcttccctgcaaaaacacatattagaaaactgacaaatcactttcttatcccttgtgcagtagggactcttagaaagcccgaaagatcattgcctggtaaaaatagcttaaattccaaagtgatttctgcaatggggaatccccaggtccagggaggccctggttaggacaagtgtagttccagatgctgctgcctgttttttaacaacccctgctttctggtgccgagaaacaccaccccaacactgcaaatccactcatccccaggctcttacaactgggcttctccaggcatttatcacatgaacagtgccacatctacatggggacacagggcttcagcattgccctctaaatctcattcatcctggacacccaagagtcttaatactgggcctgtctccatttcctcactgctgccagcccacactaccttcgctactgtctcctctcaccaagctgactccagcagcctccccacggtcaccctggtcttccctagcccacttccctccacttccagagcccagctctgcctgggccactgccatccccggtcgcatacttggagccttttgccagccttctgatgtcggttactgcaaaatccaggctgcctgtgctgtgcctgctcacctctgcaaattcatctccatgcctgcaggcctgtgcccgctgactaaccagccatcagaggtgggtcctttccagactggggccttggcccatgctccgacacatctggccccaccttccccaccccattctttgtggccaattcctgtttaccctgcagcttttggttcagatcctgcctccttccacccacctccctcccaaccccagatcagctcaggaccccagtcacgggatctctgctcttccctgcatgcacagaccagtttgccgtgagacctgcatgtgcctgtctggggctctgcatctgtcttccttaccccacagatgcaccccagggcaggaactctgtctcttgcctttctgtccaccggcacctggcaccctgcctggaacatcaatttgaacaaacaaacgcatgcacaaacaaactgattaaagagcaatcattaatgaaacccaatctcaacatgccacggcccacatgtctgaaatgttcactgcaggccaacatctgtggattctgctttgggcagtgagctttcttcctgatttctttcatcatgagcaatgtaggatcacactcctttgtgccaagaatagtaattatattttctgaaagcaaggaggagaacattcctccagatacttttccttggttagaattgctgggctgaaagaggaaggcctttgagggctccaacacatattaccaaccttgctttttcaaagtgacccccatcgccagcaaagaggaatgctcccgcgaccatttgtctggaatacattgggaagtcacctttgattttacaggtgaggagtctctgcagggctaatccttggcctcgtgggcagtgagtcccattccttggatgctctggccaagcctgaggtctgccatccactttggtgcaaggtggggtccttccttatcacggagctgaagtcaaaatggagctcactaatgagagccgccatgtactaagtgcccgctggaagctgaagccaggcactctgtggagtgcttcatgtcaggggggttggtggcatacaagcgttatcatccccacctacagacaaagggaggcccagcacagggaagtggctccttcagtgacacacatgggagctgggctttgaaccctgggcatcttgtgccagagggcggctcacagtcatgtgacagtgtgcctcaccgtggaatggtgggtgtgaggcaagggccatgtgtccaagcagagagggcacagcaacaggaatggtcacacccagtgggctggccagcatccacggtgacccagggaggaggccatcagatgcctttcagctgccatttttcaccagacaagcaaagagcagccacatctaacatgagacactgaggaaggcaatagcctaaaatcctactctgccggattgacaaaagagctggccttcaacacccagcaggccactttctgagccaagatgccccattcccgaggcatcagcatagcctggggagctgatgctctcattggctgggcttgggtcgcatgttatccatagaacatagggtggggtccacccacccacatggccatggcaggagtcagggaaggagggttctccaagcctggggagggcaggagcgtgcccccagcaagggcaggttggggaatgagagcagcttgtgtccctgcatccacagaggagcccagcaagcgatgctgctcttggtacatttcttctatctctactggttttttattaaaaaaagaaaacattccttattttaggacttcaaaaaaatctcaaactcctccttcctgcttctttcaactcagcagcaagtctatcgatttgaagcttgaaaggaactcccagcctgccttttcaacccacctgctttccgggggagatgtcccagcttggacagcattctagatgttggccttttattgatgtggtggggcattgggtgggggactggggcagggagtggatcccccaagccagaggcccctgaggccaggccaggctacagggcactgataatccaccagtcactggtcgcctaagggctggcctccttccccttaacctgctggccatgggccactgggcttctccaagactctgtgttcttattgggacatggatgctttctgcacagaaagggagaaattcagtaatgcttatgatgaacccagcactggtgcaagcacatagttggtgctcagttaattcttgttcctttctgcctgcccacagcccgctgcgcacacacagagttcctccttatctcacgaattctctcctgaatgagttcgaaccccttggggaccagcaccgtatcttatccctctttgcccccaggacacaccaagggcaaccatataacagtaccagtgaattcactagaatgaaacacatgagtcccacccccatgccacagggcctgtgaaagctggccctagacagtgggatgggttagggcagagggagatgagttctcatatttgctcccgaggactgaaaggaattcgatgtaactaaaatatgaatccacaggcggatgaacagagcagggccggggagagctggtggcaactggaaatagcagctcctcttcacacctgccgggagctggtgtttttttttttccgtgtgtgtgtgtgtatgtgtgtatgtgtgtgtgtgtgtgtgtgtgtgtgtgtatttcaagcagctgaggctgcaaatgtttgatggtcaactgcagttgcctccctgcctgtgaaccgccctgagactgtgctatcagggagcttgtctccctgggcaaagatgggggtgcccagcaaggcactgggggcctgagttctgggcctgtccctgtttgctcccgctgggggccatctgcagaggacaacacttcccagggcctcagtttctgcttctgcaaaaggaaatggagcctcctgggactccaaggtgctctggcaccactgctttgtgtggtgggcagccaggcggctttggtggtgatcggcagacaccaacgcaggctcacagccgcagaaaggggttttcttggaaagacatgagatagaattgaaaacaggtgtgtctggggaacccagctggcagagggcaggggacacagaggcttcaggaatcttagtagccacacagctgctgttacaaagaacccaatgtctgcccaccctgtgtctctagtagatcatggacttgtcccttatgaaggcaggaaacttgatggactcttccaacaggacaatccactgtaggggagaggttatccttcacgaggaaaatggagtcattttaccaaacaaagtggggagtgtgtgctcagtgctcatatgttcattaccacttgaggtaaaacaaagtgtccaagtctctgagccctttttccatctgtctcacccgctcatctgctgtcttggccttttcttccctcccagggctgtgaaccagctgagcttggctttcctgcgggtgtctttttggtaagcccatctcatttcaaagccaggcttggtttactgcacaaaagggtgcagtgaccgctagtgccttggcctgatctttcctgctctggatttgtccagggaaggccactttgttcctagaagttctgcctagcccattgattgcttgccatttgtcatggcaaaatatgctggagctgtattttccaaagtgattgaaattcttaagggaaaattggtttgatattgttggtcaagatctctcagcggagcctcctccccatctcactgcaaataaaaggattgcttttatcaatgtaatcctcaggccagagttccatgggtcttcttcttccagtttggttcatcagacatttcctgagcccctattctgacttggcatcagctcccttgtgctactgtagaaataaggaccagctagggatcctaccattgagaaattcaaagtccagcggggaagacaggcaagaaaatgggtgatccttatgccacatcggctgtgcatgctgagccagagggcagtcaagggctatgagatgcagagaggccttgacccaagctgatgcagaggagatgatgccctgggctgaggccactgccccaggagagaagcaaagagcccactggagtagggacagctctgagtgtcactgtgatggtttcttactctacccgtgacatgagctgggtcttctctgctgtcagggccacaaggtgaggcatgtatccacaacaccctcacccggagccttccctggctctccattcagcatcgaactccaggcagcacgcgagccaagctctttatcagatgacttttatgttatttaaaaacattgatcagtgcctcctgggctgggtcccagtttgtgaaaggagactttgactaggtatatgaacaaattgtaatatacaaataataccaccgtgtaattactctggtgtaagagaataattacatgggtaattgtgtgtcgtaatcggcagcgttgcctgctctgcaaatcatggcgtccttaatggttgcaaccacatcactgtgctccacacggctcataaatagatgcctaaggatgctgccgagatatgaatcctaattgtcatgtaattagagagcaattagttatttgtcccatatcaattagccattatgcatcctccaaagtcctgctacactttgaacaaaatgtggctccctccctccctgacagggaaacagaaacctgtttcccaagatccagggcccatgcgaggtggggcaggtatattgctgagggtccttggctgtggtatctttgggatctctgaactcagcgttgactattttcctggtcatggctggaagagaaagaatcccaggaaggtgtctctgtcccctggggcaccagcactttcagcagggcaaagagggtggcttggccctaaaatctggaccaggatgtggagggctgcccacacagaggctccactagagggtagctctgatttctctgacaaaaaagcactggccccagtccaagcttccccaggttccctctaaactgacgatgaaggcagagcataaaataaacagccagaaacaaagagagagaccatgccagcagctgaggcctcccactaggtaggtagagaaagctcatggagcagggataccctggccccccacagggatcaggaacagtgcttcaacctcctgccatggccgtggctgccctcagtggggtgggcatctcctcactcatgcacgctggtcctgggacaactagatgacttttcctccccaccttcctgcctctccactccagcacccctgagctctgtatgagctctgtatttgtacagtctataagggaggaatcagggtgtggaggggcctctggagagagcttattccctgcaatgtgtggtctctgtagaagtatagtggtgaggagaatggatggaaggttagaaaaatggatggagaggagaggcagctctcagagaggaaggcagaactaggaagggagcgaggagtgggggtggagtgatcgtaagacaataaaagtttcaaccatagaactagaggccattttggaagcctgagagcacaaaatggacactgcaggaaagagtcagtgatgtggagggggcgctaagcaggggtctggatggctgggtagcagtatgaagatgctgggctgggagggcaacagagccagcctgagatccacaaggtcctagtgagatccagaccaagtcacagatgtgtgggtggtggggtggtcaggggagagttcctgaaggggaacaaagccctggttaagccaatcctcatattctgattttttttctttaattatgagaggggggaaaaaaaaccatgtaatttttcatcaaaaaaggaaacattctgtataaaagataaaaatgggccattacaaacatattttcagtactgaatttcaaaatgataaaatggatttgaatgtctgtagataggtgcagaaaaagtctgatctcagaattttatacccagctaagctgtcatctgcagactgagataaaggcaacttcagatagcagaacatcatgaactgtatgtccagggacttgtcttcaaatgagactgcctggaaaacatctcttgccaacagagagatgagtgaggctccatgtggggaaggtggaggtgtacgagcccaggtatggatggagaccaggtgggcaccaggttcagcttcaacagctgttgttgtgagaatggatggaagcccagcacacatatcaaaaacatgtttctggaaaagaaaagctattgtctcaaacctggtgtatgtcaatcatgactgatattcgggaaggggagaggaaggtgaaggtgggaggagagacagctgggcccctttcctgatacagagggaggtcagaggcacaacttcatcacattagttgatgtgaacttgaagttgaggaatattttgagaaatcccaaacaatctttagttaaatccaattaggaggttcatcgcccacattgctggaaaagaacatgcaaggaaaacagccatgggcgagagactcagggcctatgaaacaaccaggaagtgtcacaaatcagaatgttcatgaaacgagggaacaaatgcaaggccaaaaaatcatacggaaaggccataaggagatgctgattccttgccttgatctcctaagggggcactacatatcatggggaggacaggaccagggaggacggtgccagaggggagctgcacccactttcaaatactccccagagtctggcaggatgcactcccagtgctggaggattgactgtgatgaacccaaaagtgctttgcgagctgtaacataggagagttgtttattattattgaggaggaggccacctaggagtatagaccacataagtgaatgacatcatggtatacttggagacactacatgtgggaccttcctcttcctgctcccatgtcctctctgtgctgacactcattggccctcccccagaggccctactcctgaccaagaataccttccctatgagacagtcctggtgctagacagcccaccattaggatattaagtccccccataaattcagcaaacaccattaaagtgtttggaggtgaagtgttaagaatatgtgtaggtagaatgatgaaaaagatgacttccttgtgctcagggcatctttgatgcctgtcagagatgcataaagattctgcaaggtaagaggagtgccaggattgagatttgtagagcacagcgggagccccgaggaagaacatcccaaagagaaatgctgtgtgggctgaaccctccagagagggcaatgcacaggaaagcaggaaggggtgcacacaggaccccgtgagaaacatgctggctccaaatgtaaaggcatattggaacacctgcctccagaacactagggcagagttctcaggagagctgaggaagtagggcaggtgaagtccaaggcatggaggctcaggtgcaagtgcatcaaagtcatcacagtcgaggttgtgtctggaatcagctgctcagcccagccgttcacctggcaaaactcctgaggatgggagcagcactgtccacaaggtgtccttgttcaggtttctctctggatactggagttcaggtctaacctatgcaggcaacctccaaagacctcttcagggtaaacactccctctatgtgaaagtgatggtaattgcatgagatggaccattccagaacctctggctgtgtgagccagttgctattaaactgtcttgttttaatggccactttcccaaagagcagttaggtgcaatcgctgtgaaattgcctgcaagtagctaaaagcaggcagcatcctgagggcactttctggcaggggccatttccaaagacacccccagccatggtccctacccacctgtgtgagcccatgtagcctgtgcaggagcacaaatgccctccaccagcccttgctggcagaggaatgaggaggcatctgagacacagcccaggctgtggtgcctcagctcatctctctaccccacacccacaactggggagaagccctcatttcttcatttacgcgtgcaactatttagtgtcagggttgggtatcggatgaaaacagacatagcccctgctctcattccctgagggaaactgacgttgatttaaaaaaatgcatcaaattgcaaaccttggtttggtaaaggaaatgtgcaaagtgtcaggaaaaggcacgggtttaaaagttgctctagaaggggatcatgggggatttttccctgcaaaagtggcatttgagcctaaacctgaaggtaagagctacataggtgaagggagcaggtgcaaaggtcctgaggctggagagacttgaagaaggtcagtgtgacagcaggtggcagaggcagagcccccaggaaagctgttcacagggacagatgagaaaggtgtggagctgacataacaagtgcccactagtccagcacagggtgcttctgcagtgggtaagagtcctggaaacagtgccgatattcaacactcaactcacatcgcgatgctcattgactcctgggagaaatggggagccagtaaaggattttaaacacaggatgccaacgttagggttgtatttggaatgatcctctatggctggataggaggggacccactggaggccattgccaccatccaggtgaggggtgatgggggtctggacagtggggctgggttttggcaatggggagagtggagttcccgtcctccttcctgaagcctgagacactggaggaagagtgggcttgtgaggacccataatgagtttcctctgaggatgttgattttaaaggtgcctcgaggcatctgagtggggagctgacgtttggtatattagcaaagagctccagggggcgctgggctggagacactcgcgcagcctctgtggctgtaacctgggcccagaggagcccacccagagggaatatggggagcaaaaagagaaggaggactggtcctatcactggcacggactcagctggacacatggaaagacccaggaggctgagacccagtcttgggctcatgggaaatctgcacaaagttcacttttcataagagtatatgtatgcttgaaacatgtagtcatgtaactaggatctagatttttttccatgtacccatctgcccatccatctatccatccatccatccagtcacccacctacccttccacctacccatccaccattcatccacccacccaccatccatgtgtccacccatctacctaccacccattcacccaccacctacccacccacacatccatccacttacctgcccatcatccatccatctacccatccatccacctaccacccatccatccagtcacccaccatccatccatccaccatccacccacccaccatccatccatccatccatccacccacccacccacccatccatccacccactcactcacatatccattcatccaaccacccacctgtccatccgtccatctatccatttatccatccatctgtccactcatccatccatccctttactttcctcccttgtaccaggcataccatgatatgctctcctctcagtgggaagacaagtgtgcaaaacacacaaggagggcagttgttgtcacaatgcaaatgcttcttatggggacactgaggaaagggcggttgaatttacctttgttcagtcaaccaagaaagtgcccaaggtcttttcctcttcctttctcttatagtgatcttagcttcattacccagttgggtggagggacggtggcagggatggctgggggcacgggcagattggggagagtggcaaatggtttctcatatctgagcctcaattacttcatctgtaaattggggttggtgacactgctctggcatttgattattgtgagatctaaattacataaggataagaaaaggctttgaagatgattgtgtgctttatagactgcaaaatgtcctagccacgcaaggattcgttctctttatcacacttttaagtagatagagatgaataaccaactatggagactgagaattggattaactgctctggactagattctgttatcatagtgatcatcactgattcatccaatgagtttttacccagggcttttccatctccagtgcctttaaaaaggatcattcctatgtatgagtcatttgaagcacgttgctttgcaaatgcccagggaaaagtacacaggcaatccccaaggcctctgaaaggggcagtggtttgagctgagacttggcctgccccgatgtgatgccttccttggggaggaaatggaagtgggggcacggtgccccatgccgacgtgaagagtagccctgcacccacgttccaaatgacctatacccaccagcacatttcatgctctgacacctgcttcgcagatgaagaaaatgaggctcagagaggcagagcgacctactcacagacaccaagaagacaagacatggactaacagttcagccagatgcagttcacagtgaagcctctgaggtttcctacaacactagagccggaggaggtgttgagtgaggaggggtcctggagctctgtcactgcccactgtgcccccagggctgctttggggtcctgtaatcagtcacctcttcttcaagtggccaaggtgtccagaaacacttatatgggagaggaatgcataactgactccatttgagaaacagattctcttagaccaggctctcttgactttggcactgttaatatttggggctgagggattctgtgttgtgggacagagctgtcctatgcatcgtagggtggccttggccttggcccactagatgccaatagtacccctctatcagttgtgacaaccaaaaatgtacccagacattgccaagtgtcccttgggggcaaaacctactggggtggaaaactaccactttgggctgaggaagacccagatgatcctgccccaggcaattggggccccactctcctgtaacaggggaagaacctggcttgggtcataactacaggtgagatgccagctccctctgtgctggtgcggtgaccttgagcatctgacagtgctgcctggtcagttcattcccacgcacatgagctgacgtgagtgatgtgccaagcctatgaccggcacagggacacccacgccctgcaccgctatcctgtgcctgcatggtgggtctgcaagttcacctggtgcctaccccagggggcttttggtctggcccaggaggccaactcatacaccccctcaggttcagctttcccaagggggctgtccctggccccgcctcaccctagggcctctagtccacgggcctctggctttaccccaaagccggcccatagagctgtggctcaccttcccaggcccccacatggctaacctccgaggaccttttctgtcctcctgtgccctgccctgtctgcccttggtttttgccctgcccgatgtccctcctgcccctatctgggcctcagcattcctggtcttctctgtgttttgagccactactcgcttcctctgcatcatttgctcttgttgggggatgagtccccagtactctggcccagccctcactttcccggggaggggttccctctgcctggaatggtcttctcccatcacccactgctgcactctgccctggcctctgagcagctacgtgcccccctccaagagggctgtggcccccgtgcccgcagtgcctcgggcttccatggctttttgtttgggaccctgaagcccctacaagctccccacagatccaaccacacctggtttatctcgagcctggcccagctctgtgaagctggattgaagcatcctgagccactctaggggaccgatggtgacatgggcacacagaggtcagggcgcacctggaggaggcccagagctctcctagctgagaaattatgcaggatgtcgtggaggccgaccccgttggtgggtgtgtgttcttggacagacaggagctgatgggggcatcagaggctctagggagtggtgccagcgggggcccaggttaggcagtcctgacctgtatcatgagctccagcctctggagcaacaaatgtggctgggatcgaggcatcagctggaggaggcacaggtccaagggggcctgggtctgagcctgtcttgcacctgcccactgtgccatctggggcaagtcctcatccctctccatgcctcaatttcctcacctgtgaaatgggatgacaatagtttccccctccgggtggttgtacaagatgaacaaacggctctccacaagggcatagcccagcacaggtgcccactgaccactcgcaaatacccattgctgtcatcattgtcacccattgggaggcatgacctgcattcatactgcagggccggagccaggcgctatggagttgagactttatttctcactattctggttggggagcagggaggggacctacccgaaccactgtcctttagatgtgtgccggtggccacccgctgaattaaaggcggggaggcttctgtggaggccctggcctgaattctggggataggcgacagtctgaacaaatgctcacatcctcgcaggttaggagcacaggaaaaatgccggctgccaagcccacggaaatggcttgtaattacctttattgatctgtttgttctgtctcactcattcctatccgaggtggctggggccaggaagcttctggcagactctcgggatttgacagtctttattaactcagctcctaaaaagagcctcagagaatacactgtattatggggtgggatggagggcgagggatgaatggattttcacctggaaggtcatttctgaggaatccctctactggaggcaggtggtggtagaaagaaagaagacagaccccgctgtcaggtagacaggggctgtgctttgtctctcaatggcttgggcaggtgacagtggccatctctaaggtggaggtgacagtgctgctcccgggaaccatgtggaagagcataggagaagtgctcgtagggtgtctgagactgtgccagcccaagatgcgcccccagcaaaccacaggctcttccacccctggcccctgcactgacatctttgaaggacagtaaagaaatagggacggctctgggtacatggggctcagatgtcaggaccactcagcacctgaaaccctcacactgttgtcttcttacccatcctcaagcctgctggagaggggaggggagctttgcccgacattccattcttctttggatattgattcttgtaaggctgggtaatgaggtctccattagcatgttgataatctctgagagttagacacttgtttccctatcgacagaggttcctgtgggtgcaaatgtagccttgggaggtagggaaatcaggtttgccaagcgagatgggatggaacactcttgtccatggctgcagaagcaagatggagcttgccgccatatttggggactgcagttaatgtatgggggtggcagttggggcatcttgactggaccccaggccctctgatgctgtgtctttcgatgtcacctcctctccatagctttaggagatcaaggtcagaagctgggtgtcattcatccctgggtgtctagagtcctactcagtatagatctgggcccaaatgggggcttcgtggccctttattcaaacccactcagtttttaatttgtcatacagggctactgagacatgggaacaagagaatcacttttatctattggatctgaggtctaggtgggactccaggccaggtaggaacctaggactaactacagacatggaggggagcggctggaagtccagactagcctggggagctcctgaaattatgtttgttcatccatacatccatctacccatccatccatgtatccattcatccatctacctattcatccacctaccaatccatctatccattcatccatctacctgtccatccatctacccattcatccatctatccatccatctacccatccatccatgtatccattcatgcatctacctattcatctacctaccaatccatctatccattcatccatctatccatctatctacccatccgtctatctacccattcatctacccatccatccgtctacccattcatccatctatccatccacctacccatccatttatctaccatccattcatctacccatccatctatccatccatccacctactcatccacccatctctccctcaatccatctgtccatctgtccatttgcccatctgtctacccatctatacatccattcatctgcccatccatccttccatccatccatctacccatccatcagtctactcatccattcatccatctacctatccatcaatctactcatgcatccatctacctatccatccatctatccatctacctcttaatccatgtattcatttatccatctacccatccgtcccacaaatatttctagaggacgtacttgatctgtacaaagcactgtggtggttactggtgacttagcccctaccccatggagttgacaacttagtatgggggcaggcagtaagtgaatgatcacccagttaattgaacttctcgattgattataattcattatcactagctagtaattgtacttaattaccccatgattgtgttgggaaaagggaggtcagggttctctgaagtagtgtcacaatgtgctcgacccaggctgtggggagatgggaaagaggctgccctgaggaagtggtgcatgagctgtgatcagctgcgtacacaaaggccctgaggcaaaaaaaaggtggatggtcagtgagtgagactgagcatggcaagagtggtggctacaaggaggagggatggcctgggatgaggctggggagacagtaggctgtgaacgctgggatagtgatagggagtttggattctactcaagaacaggggttggcaaacgttttctgtaaagggctagatggtacatactttaagctttaggggcatacgctgtctctgttgcatgttctacttggttttgtttcattttggttggtattgctttaatatacaacctgcatctgtgtcccatggctgccataatgaaggaccacagattggatggcttaaagtaacagaaacgtattctcacactgctctggaccagagtctgacatcaaggtgtgggcaggccccaagcccagggcagtttccttccttgcctcttccagcctctgatggttactggcagtccttggcttcttcttggccaccccactccatctctgcagctgcctttttgtatggacttctctgtgtgtgtttgtccaagtttcctgcttcttataagaacacagccattggatttagggtctagcctattccaggatgaccttgtcttcactaattatatctgcaaagtctctattcccaaataaggtcacattctgaggttcgaggtgagcataaatttgcatgtgtggagcaccatttaacccaatatgccatgctttaaaaatgtacaaagaaattcctagttccctggtcataccaaaatccgttctgtggatgggagtctgctgacccctggccctctctctgcattggctgggggtgaagggtgagatggcagagtggggaggaaaaggagaaggtcccacaccaggcatgcccagatgtgcagagctcttctcttcctttgttgagggactcttcaaacaatgactgcatgccaccaccgtgggccagggactgttcttggtcttgggcgtgtagcagataacatcaccagcaagaggccctcaggaagacttcatccttcatttccattttcctggaaataaaactgaggcccgggggagtaagtgacctacccagggcaagtctagtgcaacagccatctctctgtctgccagaatttcccacattcgcaaatcaagcaggagtttcgtgggggcattattttccctgccacttggactcttccatgccactagatggtcatggctgaatgagaggagtgccatctcagaactctggggtttggaggggaatctgacccagctccctttctgggagcacgttccttgacaagatgccatctgcttctgcttacatacctccattgatgggagcctcactgactctaatacacagctcagctggttagctctgtgctgcaggttccagattgcacagatggagtttattccctctctgggcataatcagagaatcatgcttgtttatctcatgtgcacgtactgttctagaattcaaagtggtctagtcattcttttaactgctgtgaattccgagggccttgttgcttttgactatcgctaagcaatgtaagtgagaacaattgggctaaaatttaaacaacctaattccaggaaaatggtacttgttagaaattactttatgaaacataagatgtcaggttaatttatgtgagaacaccttcctcctttgctttccacattgggtatttttgcattcccgcaaaagaagcctgccagggaaattgcacagttgttagcttcagcccaggaagacatttctaatggggatggagggacaggtgtctcccggcttcactgagagaggttggcttgtgggccatgaggctgcaggcccagctttaaatcgctgcttttctactgtcacacacacacttgaggccatttgtccctctatgaagtggacattcatattctctctacttctccagccacgctgcccctgtggccccctctaggacaaggtccttccttgcctctcctggttctggtggctggctgactgtccctgcccttcctctccggagagctctctgccttcattgtcacatggtgtcagccccgtgtgtgtctctgtgtccaaatttcccctttctgtaaggacactagtcatgttggattggggcccactccgatgaccttgtttactcagttactgctataaagactgcaaatagggtcatgttctgagggagtggaggttacaactcagcatgtgagtctgggcacattgctcccagtgtactgggtggtggcatgcctgcttcacatggaaggaaggcagctatgggagcgatgaggagctgggcccgagctcaccagccgggaggtggctgctgtgctgggatttgaacccagcatccatcccagttttcatgctgtgcttgtttccacggcagccacagcacaaaagctctacagaagacaggccccatgccacagtcgctgttacaatgagtattacaaacattttattcgagaaagaaaagaagcaaatggtcccaataattccctgatttctaggcagctgtctggcttttttttgtcattgcttgccttagttacctgtatcaacaggcttactttttctgacctcaccacaggagctgaactttggaagtggccactggccactctgaatgagatgcggtgcaccggcaggctttggaaattaatttcctttggatgctcctcctcatgttacgattgaggcccgtgtgttagctacctcgagccaaaggtgctcagagggagggggagcaagggcttcctggcatttctggattctgtggagactccactcgctcaggctgcgtttgtttcctctgaccgaggatcgataagacatgattttaaaaataaatgactagtccctgaagaagtactgtttccaaacaacttccccggctgaccctgagacagaaactcccaccctgctcctgggctcagaagtgagaggattattctgctcttggaataaaagctgtgggttccatcctgaccagaagatgatgaggataatgcagatggtgatattgtgctgatagtagtatggtgattagaattatgaagatgaagatgatgataaaggagatcatagtgattaggatgatatgatgatgctataataatgatgatgaaaatgattaggaaaatatgattagcataatgatgataaagatgatgattatgataaagaagatgatggtgacgtgatgatgatgataccaatcacgatgatgatggtgatgaagtgatgatggtgatggtaatgatgatgatataatgatgataatgatggtgatgatggtgatttttatggtgatgatgtgatgatgctgatgatgtgatgatggtgatgtttatgatgatgacggtggtgatggtgctgtgatggtgatgatgatgatgatgtgaaagtgatggtgatggtgtcggtggtgatgatgtgatgatggatatgatgatgatggtgatgatgtgatgatggcaatggtgatgatgatggtgatggtgatgatggtgatgatggtgatgatgtgatgatggagatgatgatggtggtgatagtgattatggtggtgatggtgatgatggcaatgatagtgatgatggtgatggtagtgatggtgatgctgtgatgatggtgatgataatggtaatggtgatgatggtgataatgatggtgatgatggtgataatgatagtgatgatggcgatggtgatgatgatgatggtgatgacggtaatgatgacagagatgatgataatgtgataatggtaatggtgatggtgatgatggtggtgatgatagagatgataatgtgatattggtgatggtgatggtagtgatattgataatggtgatggtgatggtggtgatgatgacagagatgatgataatgtgttaatggtgatggtgatgatagtgataatggtgatagagatgatgataatgtgttaatggtgatggtgatgatggtgataatggtgatggtgatgatgtgatgatgaggtgatgatgatgatgatgactctgctactgctgctgctgaagatgaagatgacggattgatgatgaagatagtgatggccatcacagttaatatttactgagcctctaatggatgccacataacattcttatttttaccaccactttacagatgaggaaactgactatcagaggccacacagcaggttagagttggaataattcataccagctgcagtgacaagcaaaaccccaaatctcagttgttcaacacaacacaagatcacttctcactcagggaagccccaggcctgtgggtggtcccccctttggcttggaggagacactctggttctgagctcccttaggaagtgacgtgcattgctcttgctcacagccaactggctagagctagtcacatggcctggcttaccttagtggatgctgggaaatgcagagggggcacatgggtatctggtgaatgcttacaactggctagagctagtcacatggcctgtcttaccttagtggatgctgggaaatgcagagggggcacatgggtatctggtgaatgcttacaactggctagagctagtcacatggcctggcttaccttagtggatgctgggaaatgcagagggggcacatgagtattgggtgagtgctctctgtcacccagttaggaaggacctgaacttagatttggacataggtctactgactccaacacccctatttatttttgtatttatttttcaagtgcattttaaaatagtttaaaattttataactgttttaggtttacagaaaacctgtgaaggtagtatagagttcctatatcccttgcccacaatttcctgttattaacatctgacattggtatgtacatttgtcatgactaaggaaccaatatggatgcgttaatgttacaagtgcaaactgtattcagatttccttagtctttacctaatgccttcatcgatctcaggatcccacccaggactccacgttacatgtagtcattatgtctgcttcggctccgcctggctgtgacagtttctcagacttcccttgtttgtgataactttgacatttttgaagagtgctggtcaggtgttttttaaagaatgttcctctgttggaatttgtatagtgttttcctcatgattgcactgggattattcctgggaggaagaccacagaggtgcagtgctgtccccatcgcatcacaccaaggccacaccctgccaacaggacttaccactgttgacactgacccttgtcactggctgagggatgtttgccaggcttctccaccatagagtttctctttggcgccctttgcacactgccctctttggaagaaggttgctatgggcagcccatgtttaaggagtgagtctccctccccttgagagcagaggacctgcataaattatttggaattcctctgcatgggaggtgtgtctcttccccccatttatttatttaatcatgtatttatatgaggatgaactcatgaatatttattttctcctttcagctataatccaatagtaccttattttattgtttaagccattccagctttggtcattgggagcactttcagttggctgctgtgtctctttgacatattccgatcactgtaatttttattttgtttatgagcacgtccttgctttctggcgctacaagatgctccaggctcatctgatatatttcctacccagtccaagcatcaaccatttctccaaggagctctgactgcttttattggagaatggtattagaaaccaaggtcaagatgctaggcaacatccctaattatccccactacaccagaggttccaaaactttctcagctcacagtgcccttcgtggctcaaaaatctttcacagcacacctaggccaaacaagaaacaacagcaacaaccaaaacctaaaagcttcacttgtgaagcaattaggttcaaacaagttagcaagtatctatgtcctaatagcataagtatttatgtcctgatacctaatagcgtaggtattcttttaaaatggtacacataaatcaaaaggaaaatagtgtttttctttcattcttcaccactgcttaatgacaggctgtgcacttgcgatgtgctacatactctctccagaccttggaaccagactcagttagatgcttccatcctcatttcatgttccacattgattttcctttttatcacagcgaccaccaaaaacctgactttgcaaagagttggtatcactgagagggatgtggcatgatctaaggtggaaaccgtgaacaacctgactggtaattggtgcaggatccaagaaatgttggtcactgtgtttccctcaaaaacttaaaatatcccaccaggttcctgtgagttgactatggctaggatgctcaacccacagtttgggaaccatagtgctatccagtagaagtctattgcaattacaaggtagtgggaaggaattccgtggaaagtgactgatctagttcatctcttcccgtaggggtcagagatgagcatggcacaagatgtaaaccattcctaggcctattcctcagaatctcaaaggtggtatgggaacagctccccaaggctggactctaccttggctcagaactcccacctcacctctcttggatctgtgtcaactcctgccatcctatcagggatctgtgtttcttggggatgtctgtatcagtagctgtgtggcaagctacaggagctctggaagctgcttccatttccagggtgttttccaggactgtgccattgctgttgcccagctcttgggccacctcccaggcagaagtgattacggcaggaagtgagaggtgagaaggcctgtgccttgaagagcctttagaaatatccacagaggctgggtgtggtggctcatgcctgtaatcccagcactttgggaggctgaggtgggcagatcacaaggtcaggagtttgagaccagcctggccaacatggtgaaaccccgtctctactaaagatacaaaaaattagctgggcatggtggggcacacctgtaatcccagctacttgggaggctggggcaggagaattgcttgaacctgggaggcggaggttgcggtgagctgagatcgcattacttcactccagcctgggggacagacagggcaagactccgtcgcaaaaaagaaaaaagaaatatctacagaaggaggaggatagtgctgtgtgtgtacaatatgcccattttacaatagcctatcctatgtgcagagaacatgtgtgtgtggagggcacgggtgcagatgctccgtgacttcgccatgggtttatcaggacgtggaatcataagtccagccaccacagggcggggccgtctgcatatgggtgcacgtcttctctacacatataatacaacatgtacatgtatacacaacacacgtctgatgaatgcagtgaggtgcagtgtgaaatagatgcttctgcaaaactgtgaggcactaagtgtcctcagcccaaataaatgtccttcggagccactgggtggatgtggcctctccggaacttcctcctccccacccctgtggatgtggcttttagagacactcagggctgctctggtagcggctggatgaggtgctttgttcttcagctctcctgggcaggggacgagggctcccagcgttttcaaggggaggagatgcaatccactgcagctgagagcagggcccccataaatcggatcctggctctaaatgctaattgcttggtctaaggtgttattgatagagccggagaggggagcgaggagattcattattttggatttcagtggctgcggaggggagggtagtgagtgatggattagaacgcagcccgtctgctgtggagttccgatttataggcccataaagcagaggccggtggagcccaggcacaggcaggccgctgagcctgtgtcccactttgtactcacagcctcgaggcaacctccactcatgacggtgcctcctcgctagggcctcctgggacgcagaccctcccactcccgctgccagaggctgcttccgggtgggccctgtcactagtcactgagggttcgctgggtgctctgccctgcaggctggaggcgcccccagcagctaacaggaccttggtgtgtgtccccatctgcatgtcactgttttcaaagggaagccaatctgctcccacctgcctcccacaccgccctgtagatccgccaccctgcatagagggcggtgcccatggaaatgggaggtggggcccagggttgaagtgagagtgcccagggaggcattgtgacttggaaagtggcttcctggttctgcttttgtccccttccctccctgccagaccccatctgccatgtcctgtcagcaagccttttcatctccaggaacccccagttctcatccagaggggagggttttaatcagtgcccgaagccagggtccaggcctcaactattggcaggggatgggggtgggagggtgacagctatgaatttgagaaaataacaccatgagttcattgtcatccaacaagctgggggaggggccgagtctcctggctgttggctttgctgttctgccccttttccagcccatggcagcccagggagacttcagaggcgcagccactctccaaggaaatccctgcctgtggctttagtgagaaccccatcacactgtccccatctccccagctggagcgtcctggatttagtaaaataagcagttacagcagcccccagccctggacacctctcatgctggtgtttgttcaagaaacagaaagaatgcagtgaacctgggcagcatttactcgttaggtttttccgcagatgctctctgcgcatcgcccctgggccaagccttgtattgggtgctgcaaccacagagtctagccagacatggcccagccttagcagagggctggctggagaagcaggacccctgtgcccggtggagaagaagggaaagggcatcctgggtggtgggtatgacaagggcaaagactcagaggtgggaaaccacatggcaggaccctggatgggttggggacgggaaattgagttcactcccccagtgtttgatgagaatagctctggccatgccccgtgtgggtggggtagactcaggggatgagatgagggacccgcaaaattctacctgggcagtcccgtgggactactatgagaaatggaaagtgggtcatggaaggcttcctggaggaggtgacagtgggcagaggtggtctgcccattccctgagcaagtggaggagggctgaggcagggactggggccgagagggagggagcccgaagaaattgggggcctgtgctagcagagcatgtcaccaggaaaaggggccaaggccagcagcttcaaagcctcagcaccaagcgacgttgaattatggacgtcattcagtgttaatcatggtgattatcatcagcgatgaaaaaggacaaacacatcccagtaacaagtccagctcgttagcttcctgggacttgtcgacccccctcgcggtgccagagctgacacttagctgctgacagtgtcatccgctcaactcagcaaacgtgccctaccagctgcctgtcctccaggcaccaggctccatcctgggcctgcaggaagaacctgacagtctgtgctttgcccctacgtatgtctgggggcagctgctgggtttgatcaaagcatcctcatcttctctctgccatctcatgctccgtgaaattcaagcagcctcctggtcttgaagctcctcagttccctgtgagctgggtcttccttggggccaaatatacaaggtgcaagacaatagcacagggcgtccaaagctgaggctgaggccccaagctttttcagtcactttccccattactaaaaaatatgggatatgcacccctactgtttctttatttacatatatatatatgatattaacatactctgctagtataatctttgtaaacatacacacagtttacacatttttttaaatgagctcaagatgaaatcatttaatcatttacgtttaatcatttaaacgtaagtttctttacgtgaattttttttggaatttaaactgtaatattaaggcatattagtgagagcaataagatattcaacactgtcttgttttttgagaactttcattctttgtgctacagcaagacttagcccatgttagtttgcttcaatacttgatgctcgtggccttcaaagatgaaaagcattctgcacaaagatgtgtagggtatgtgggaggaagggcttgttaccatcacttcctaaatcatcagcatcatttttcaatttcatttaacaggactgcaaaattttatgttgaagttcagctgctacagctccatcaattgtcaatcaattttcttgcaaactcactgaaaggtgttgcatttttaatgtttttaacacattggctaacacatctgaagccccttggtttggaagacttttaaagaggttaagaaatttttatttccaggattttaaggactgcacgtttgagagattttataagcgacggacaacatttcataacattggaaatatttccaaacatccatttctaaagtgccccgtcatagtctaaatccctttggaaaggagagctttttctcacttattatcaaagtggctgttgatcttgaatggacaagctgcgtgtgttgctgctttttgaaaatgtaaggtgagtggcagacatgagaacagcctgccttcaattcccattcagaacttgcgtcttttggtaaaagaaaaatgcgcaatccacctttgagttcaacagctcttgaaagcatattgtttataagatactcctccaacttcaacaagcacacaagatccctgcggcatgatatccaactcatttcaaaagtctcctattgaaaggtgttgtcttcataaaattagccactccagagacatccctttgcatacaaatgttgacaggtcccagtggcaagacctcggttactgtgtggcaatgcaggtagacggtgccaatgtcagtctggttcctaagtaaaagtaaaggcaaaggtttccttatttttcagataaaatagaggcataaatagagttctattagtttcttggtgtgttctgattttttgtttgtttgtttcttgttttttgtttttgagacagcatctcgctctgtcgcccaggctgaagtgcaatggtgcaatctcggctcactgcaacctctgcctcccaggctcaagtgattctcctgcctcagccccctgagtagctgggattacaggcatgcaccaccgcactctgctttaaggaattaggacaaaaggaggggtgaaggggaaaaatctttacacagcacataggactaggggccagaggccagagcccctgccaggctactcccctttgtgcatctttagggtacacagtggaccctgtggcttcagtccttaacttcaggggctccccatgcagggtgaatttcaagtggctgtcctgcgcccactgcctccctggcctcctcgctgtgcttgggaagcagcaggcccattcctgctggcacacgcgtccactcagggtacttggtcccagaaatccttggctcttcctgaatgtcaccttctcagaaggcagcccttgtgcaccgtctagaaccgtcccctcctcctcgtttctcctgagccctttggcattgctttattctcttcacagcatttgtcattttagaaattgccttatttgtatgtttccttgttctcagtcagttccccccagaagctcgagcatcagctcagagaagcgggttgggtcccgtgcgcctttgcggccccaggacgggactgtgttccccaccctcggaggtgaggtgcagcgagggtgtggtcccttctcccacgggatcaccttgatgactggcttcccctgtcacagagatggactgcagtgaagagaggtactccctgagaacagcttgcctgtttacagccaagtgcattttttaacatagaaaacagggagttgtttacagccatgtcttagagagtgatgacgtgttcttccagctctcgcccctgccttgcttggcatgggattgcctgccgtttcagctacgtgtgtgttatgcagaatgtcaggtcagcgcagcaggtgggaccatgcctcgttaaaggagagagacagggggaaggaggaagagaggggaaggagggagggagagaggcagggaggcaaggagggaggaaggaaggaaggagagaagggaggaagggagggagagagaggagatggctgagtatttactgaggaatcagagtgaaaaatcataaggaagtcaccagggcagggccttttaggtcaacccccatgagcaggaggaagggcggctcctctgactgcatctgtggggctgcctcattcatctgaaagatgccgtgtggcatgctgtccccagggatgacttgagtgaaggagccactgagcaaggcctctgtgtctgttagcccagctcctctttacaccgcccattctgcagggcagaaaagtcgccatgtcccgactcctgggccctcctgcaagagcactccagatgcctgagagccccattgtctcacctcagtgaaggggacagagagatatcttcagaatatgagagggtctctgctatgaggacacttggtgaagatcgggggactggcggtgggaggactggggctccacgtggccctctgggcttcattgccataaccggcatccctagaacctggccgcagcctgttcagtcctcagatgagactctcctcctacttcacccatcctggcactctctgggctcagttccacagaaatatacgagccgtgtgtgtaattttaatgttcattaaccctattcaaaaagtaaggagaaacagccaaagttgattttagcagtatattttatttaacccagtatatccaaaatattatcatgtcaacaaataattaatgtgaaaatttttgagatcttttatgtccttttttccatactaagcctttgaaatccagtgtataatttagctgcatctatatgtatagatgcatatagctctgaattcaactgctacatttttattgggaattacttgttctatatttagatttcataacattgacagttgtaaaagtaggttcacatacgcacattgttccaaagacacttaagtttcgcaataacagtgccaagtatcagtttttaaaattaaatttaaattaattgaaactagaatggtagtaccccagtcacactttgaaggcttgatgaccacacgtggctgggagccgctggactggacacttgctcctgtgtccttgtttacccatggcttagtgctgaccggtgtgtttacgcatcaggatcagagaggttaacagatgttcttgttgtttcttcttttccaagttgaacccaggagaaggtctgtgtctggctatgagaggtttagggtccaatatttgtagtgggcgaaggaaggtgaattatctgttgtttctgtttctgttcagtaatttgacaactgaatgatctgagttcataattaagaaattagttttttgaaagggtcggttgattcttgaattgatgaagttgggactgtcagctttctaggagatgtcacatatcagtgaacaaacaagacttcagcaactggtgcacagctgtgtgtgtgaggacgaggaagagctccaatggcagagtgttcttagaaagcaggattaattagcgtgcgagggagagaaaggtcaacaccactaacattctccttctgaccaaagccatgtgctcagctgaattgctgttccagcaaagacaaagccatgtttcctggccccgggagtcatcgggaggcgtgggttggctgtgtaaagtcaaaagtcagtagggatctactaatgagcaattgcatcctaaagataagagcacccttccagcaatcacttttagaagaccattttcaaaaatgagctgattccattaactaatagcatatctttggatttaggaaaagaaagcgataggaaacgacaaagcaagtcacaacagccatcgagtgcctgctagagccaagccctgtgggactgagaaggggttggattcacccctgtgtgcatcttactacaaaaggtgacatttgtgttgggtattgaggaatgaataggagttggctgggaaaagacccaaagagctggtgctcaaaggcctgttgatctaagacgtggtgacagagggacacatgtggaaggtgtggacgtggagaggtggtgagggagaatggaatgtggaaaacgaagctactgtgggcggggaggttcctggaatgccatggtagggggttgagagtctgtcatagacagcaaagggctgcctgctcaagcggccacaggggccagacaggtgctgtaagaactggagccagcctggctcatggcacatgaactcatgcgtgccccacccagcggaccacagcaactcagttctattcaattttaccatctggaaatggggccgggttatcgcagtcttctgagattgcatgggaaatgagcagggtggatattcacgtgaaatgtcatggttgttgaatccccatgaggacagatgtggtcttctggccacccctctgccatgtttattagaattcggcaaggagaggtttaggcacagtcctgtcagagttgagttcctgttttagagagatcacagctgctgtgacaagaacgctcatgtggagggtgtgagctggaggtgggtccacataagggagtgtgaggtttgtccagagcagggaggggagagaggatgaaactgatggaaataaggagagggttccttaaagacatggcacatctctcagcaccagttccctggtggggagacaggtgaaggcaggtgggtagacaggtaaagccaggtgggcagacaggtgaagtcaggtgatacaggtatagtcaggtgggtgtacagatggagtcatatagcatacaggcgaagtcagctagtgccatggtttggagaagtcatatagcatacaggcgaagtcagctagtgccatggtttggagaagttatgtagcatacaggtgaagtcagctagtgccatggtttggagaagttatatagcatacaggcgaagtcagctagtggatggtttggagaagttatatagcatacaggcgaagtcagctagtgccatggtttggagaagtcatatagcatacaggcgaagtcagctagtgccatggtttggagaagtcatatagcatacaggtgaggtcagctagtgccatggtttggagaagttatatagcatacaggcgaagtcagctagtgccatggtttggagaagtcatatagcatacaggtgaagtcagctagtgccatggtttggggaagttatatagcatacaggcgaagtcagctagtgccattgtttggagaagttatatagcatataggcgaagtcagctagtgccatggtttggaggtcatatagcatacaggcgaagtcagctagtgccatggtttggagaagtcatatagcatactggcgaagtcagctagtgccatggtttggagattatttgtccctgccaaaactcgtgttgaaatttggtgaccaaagtggccatgttgggagggaggcctagtgggagatgttaggctcatgaggatggatccctcatgaatagattaatgtcctctcaggattgagttcttgctctctcagaaccagattggttaccacgagagcaggttgtacctttcatgtttggtctctttgcgaacgatcatttctacttctatttccaccatgagttgaagtagcctgagacccttaccagatgggctgcctgatcttggattttccagtcaccataatcatgagccaaataaatcactttccttaataaattacccggtgtcagatattctgtttatggcaacacaaaatggactaagacaggtgggcagacaggtgaagtcaggtgggcaaatgaagggactcttgacctaaagtcctttgaaagtttttctggtcacctgccagcagctcttgtctgtccctgtgaattacaaccaaattatccatcacaattacttccagttaatttgtcctgctaagcctgagccagttgatgagtttccttaattttgatcatttgctcaagggaacgtttacttcttttacatgtaaagtgtgtctaatggcaaacaaagccgagaatgagtgttgagtgcctgcgcagctggggcaggccgcctgggctgcagttccagtttcatgacaggcttgttcccaccccgacttgacggctttgacaggtcacatgacctctctgggactcagtttccccatctgtaaaataaaacacacggaggatttgatcttgtggtttctcccagttttggaattctactcaatttcatttctgcaaatgttagtgattgaaacctttctgtttgctggatagaagcccaccttatccctaagtttactacttctcactacttccgaggtctggctgtgggtggatgtcagggagcttccacttgtcttcccatgatgccccctgcacacaagtctgtgcatctcacagactgggatgtgtgaatgggcagatggctataatttcatttcagtatttatggaggctggtaatgcccacatgtcctctctctagctacccccaacacaaacccatcaatccccagactcacacttggggctgccttggttcctaggctatatcacatacttttgtgtttcttcaatgagaaagtctcttaatctgtcgttatttttcccatccataaataatgatgcatggatcattttaatatatatttgtattattatgattattttaattctatttcataataaccatatactgagtagctgagtacctacaaaatcccatgcgctgggctaggccacacccacccgtgtgtgtgtgtgcacgcacctgtgtgcaatatcatcatagtctcacagtattaggaggtaggtgttattaaatccatgtatagctgagcaaactgaggctcagagaactgattctcccccaagattccatggccatcaagtggaggagccaggactggaaccctccccttggtcctccgacctcctttggctgctctcctggattctactcatcttgtagggcctggtccaagtatccctgaagcctcagggccagtaagacatggaatcaagccacttctgctatcttctttatcactgacactgaatgtactttcagtgggtgcttgttctgctctgggccttgtgtgaagcattcagtgtgcagaggtggatgagatgtgtcctgtgttaaggagtctgccttctgtcagagataaaaaacctatgcacatctggggctcctagcacgtcaagacacacaatgccaggaaattatacacgtagaaagaagtcttctacctagagggatccaggaaggcttcctggaagcagaggcaactgtgctcacagttaagagctggcatgatgtgttcatgcagagtggagtgagtccaggcagagggaaggatgtgagcataggcaaggaagtggggacatgcttggagtctgcaagtagatgtgtttgtttatgagggtatataaattgtaaatgggtatttggctaaagcaatcactgtacaggctatgtaggcaaaacccaggcttactgcaaaacctttccaattcatatagtaacttgtcattttctacacaaatagataatgcaatacttttattaactgatagaaattgctttgcacaaatgggtgtggtggctcatgcctgtaatcccagcactttgggagaccaagggggacagttaacttgaggccaggagtttgagaccagcctggccaatgtggtgaaaccccatctctactaaaaagatgcagaaaacaaaaatagctaagcatggtggtgcacgtttgtaatcccagctactcaggaggctgagccatgagaatcgcttgaacctgggaggcggcggttgcaaagagcagagatcatgccaccacactccagcctatgtgacacagcaagactcagaaaaaaaaaaaggaaaaagaaattgttttgcatagtgatctacttttatacaaagtatttattggccttttaaaattcctctcacagaaagtttcagggatatattaatggtaacaatattcttacagtaacaacactccaaaaacagtgtttcacatctacctgtttgggagctactatgggcagcagcaagcatcccctaagaacaatggagctgtccttgggggagatgtgggaagagttttgcaggagcaatgtgtggcaagaatatgaatcctgaacccttgagtagggagaatttcttccatcgtgtaaaagttagactagtcagaatgtgcatctcagttttagggggtgaaaatcaatggaggagtaaaagtctgacgaaagtttactgggaggcctcccccaaattataataatagatatgccctgggattataataatagatatgccctggggtgtttattctttgttttatatacattttctaaaatccttacaacaatcttataaggaagacatgatgtcatcattttacagatgaggaaactgaggctcatagaagaaaggtggtttgcccaagattatgaagctagaaaaggtgcacctgagaaatgaaaagtgatatgtctaattcaaaaacctgcatatgtccttaatttttttgaaaaaaaaaaagctacaataagttttttaatgaaaaaggaaaaagggtattaaaactatgtacagaaaaatataaattataatataaattctaattaatacatgaaaagaggctcagcctcactcttaatgaaaaacaactatgtgtcatttttactttttacattggcaaaaaaatactaagataaataataataatatccagtttggtgaggatataaggaaatgagcatgcttctattcatcttattgcatatattgctgttatttttaaaataaaaagtccatggccttttgatcacagaccacagtagaccccatcccagacaaaaatcaaggcgtatgttacgcatgtggctgctatgacatctggggtggaggaggagcccccgttgtgagtatggtggcaggggcgggggtacctaactgtagctaggcctggtcatttgaggcccagcaaactccacccaggacaggagccctcacgcagattgggtcttggctgctgtgggtgctgtccgtggtgctgacctagctacgcctctcaggttgcttagggtcccccacagctctagcccagccctctgtacacagtgtggactcttgctgccagaaacccgtccagagtctggatgctaggccctagctctgccccagtgcttgctcattagagacaactaaaatatcaaaaagcaggttactcacctgtaaatttaccacctagaaatggtgtttttaaatttcttaatatatctccttcttgtctttttctatatatctttatttcatagtcgagacaattttatactctgaatttttatcatataagtatctacccacattatcaggaatgctttgtaagcatcattttaatggcttcaaaatagtctatgatttagataacgatgatttggccatttttgtggtcacctaccacttattggagacatattatattctgagaatattatgccatttataggcattaattccaatatgcaaaagaactttgaaatgaaggcgttattattcccaattttacagatgctgaaactgaagctcagagaggttaagttgcccgaggccatacaggacaataggggcaaagatggttttgaatcaatggatgtctgacgacaaaggccatgatctcaccactgcactgcactgtctcctgaagccctttgtgtgaaatgattaaatacatcatgattatgtcacacttcacttacccttctccaggtagttgaacatctggatgattttacatcgtcaaatacaaggttgttaacaattaaaggataaaacagggtgcggccggaaaggcggccgccccctcgcccatcatgcaatgcacattcgtggggaacctggcgctaagccattcgtagatgacctgcttctggctcggggtttcatatgtagcagagcagctccctcgctgcaatctattgaaagtcagccctcgacacaagggtttgtaaaaaaataaataaataaaacaaaaaacaaaaaaaagcaattaaaggatataaaaaatgaagacccctgagacataatcagtgtcttgcaacctctttctctatggccacaccacatccagcaagagcgtctgcccctatttgaatgcctccttccacctgggtcagccagttcccttagcagccgtagcagcaattttaacctgcaagcagcctgattggcccagctggtcatgcccaccctgtcactcatcactgccctctctactgattggcttctcttgggtcagatccccacccaccgtgggcttattccttgaacacagggctgtggcttcctaggacttggcacatagtagctgttcaattcacatttgttgaaatgaagaaaattgggtcagcattccttaggactttggcaaacgggctgaaacccaagtctagaaaattgcccagaaaaggccctgcccaggtcagcctgggacagcagccacctctgtgggaggaagtgagggttgcaaaaagttctagtactttgtctttctgaccccatttcaggtgccttctagtgcctgaaagaattcccaagcatccagtgttccttttctcatgagcttaaaggcaccattggaaggcatgcccactttcgagagagggaagatgtcactgatggtttgctccagaaaagaccttaaggatcatgtattccaacccccctacactcctgctagaaaaaaaccctggagctaaaacaggaactcaacttaccgaagtcataccacctcgtaataataaagtaggcctcccacccaggtttatcctcagatatggtttggctgtgtccccacccaaatctcatctttaattgtagctcccataattccctcaagttgtgggaggggcccagtgggagataactgaatcatgggggcagtttcccccatactgttctcatggtagtgaataagtctcacaagatctgatggttttatgagtggaaacccctctcacttggctctcattctttcatctgctgccacgtaagatgtgcttttcactttctgccatgattgtgaggcttccccagccacatggaactgtgagtccattaaacctctttttctttataaattacccagtctctagcatgtcttcatcagcagcgtgaaaacagactaatacatatgagcactttacacccatgaagctcaaatgtggttcagttttattcccagcttcagcacagcacagagagcttaggtctggggtcaggaagaccagagtcctgcctctaatgtgctacgtcttatatgcagcctttaccccttgtctcaatttcctcatctgtaaaacaggatgaataagacctgctcccagaggctagaacctttgaagactgagatgatgcatgtgactgtgtcttgcggacactaacataaggttttatatgaggacagcatcttcgtcttcattcacagtccacatgttggatcctaatatagaatctgttgcatagcaggtgttccataaatgctggtttgctaaatcattattagtagtagtaacaaataattgtcatggataagaggaaaggagtccaagagcatgggaatcccagtggcctctgagttggagcagggaggaaatgtggatgaaacagagagttgggaaccccagaggcccagtttcttgaccctacagttgggtctgtgcccagtactggctgtgctttggaaactgaaagagtacatttaagaaaaagttgcttccatgatgggctgaaggcacagatactcagtagacatttaggtctagaaaggaacttagacactctctagtgagacccctccacctcacagggaagaaacctgaggtctggtgaatgcaaggaacttacccaaggtcgcaccatgacagaaatagggacaaaggtttttctgagtgacgagtctctctactactctcactctaagaaaccaggctgcctccacagtagataaacacatgcagaggaggtcttgctcctgcatcccttcctaacgcagagcctaaaccacagcggggctcagctggggggaggttgcatctaagattgagcagttttgcaggcacagttccaagagcatcataattctgcagccctcaacagactgtgtgtgagatttccaaagtgaaataaatgctcccattacccagttgaactgagaatatcgatgtcattagcctaattgtgtgcgctgtgtttatagactcccatgctaggctctgggggatgtcaaaataaagcaagcacattgcaaaacacaaagggggttgcagcgggtgatgtgaatctcttgttgtgattcccggcgtgactgcatttctcaacatgcacgccctgagagggagagaaagagcagccgttctgtctgacatgtcagagtctcagaaattgctctgttgatggacaggaggaagaggtgaagggagaaaagatctgagacaagcatataaaactgaagaatataatttcctctctgggacttattttctttagtggggaatgggcaggatggtcggggaagcctcttgcatctccctgaagcaggtccatcggggcctgagctatcacaggaagaatgagttgggctaaaaccgtcagctctagtgcggcctgcattcctgcaccagtatctcaaaacccgccggacttccaaggggtggtttgggctgcggtgtaggagtggaatgtggatcactgaagtacaccagaaaagggaacccagcctgaggctgcctctggggccctcaggaggtgacctggtcccctgtgtcaggcaagtccctcccaccacatttccgaaatccacctgtggcctcaccttgctgaaactgcagaacaaatcacaggactatcaggggaccaggatatctctcgtctaccacttcaaggtattgtagaaacaacttatagactagtcactaacttatcaccatttcatcttctatcttttgtgttcatgaactaactgtaccattttcattgttttatgcgaatggtttcaatgctcacagcctcttccatccttgagttagtaattctgattcacctctcagctggctagggtacatctccaaggactgtttgggaggacgcatgtgggggagcagccttgcccctaggattttccttttattgactccatccctgttgaaggacagcttgactgaaggtgagatttctgagtcatctctcttccttgcagacatctgaaggggttgctctatttgcttaatacttagccttatagagggagccatgccaatttggcagttcatttatctcgcctggttttcttcctccttctagttaaatattttcactgggatgggtctgatgtttgcctccttttcatgttgaccttgtcttggacatgctgagctgcctcactctaaaggcattgctctctctttggcagccactctgttccaattgttctggcttctctgttgggaacgcctatgatttggggcttgatatctgtgctctcatctttagggccattttttccctcccattaatttgactgatttgcttccttctgccaccttctgggagagctttgcaagtctgtctgtctggtccctgattctgtttctacgttttcattctgcctttcactgcccccaatgacgatgttttttcttcaacatttattttaagttccaaggtacatgtgcaggatgtacaggtttgttacataggtaaatgtgtgccatagtggtttgctgcacagatgaacccatcacccaggtattaagcccagcatccataagctatttttcctgatgctctccttgccccattctcccaacaggcctctatatgtgttatttcccccacactgtgtccatgtgttctcatcactcagctcctccttgtaagtgagaacatgtggtgtttggtttttctgttcctgtgttagtttgctgaggataatggcttccagctccatccgtgtcccggcaaaggacatgaactcattccttttttatggcagcatagtattccatggtgtatatgtaccacattttctttacccagtctatcatggatgggcatttggtttgattccatgccatggacaattttagtgccacttttactcagatatgtttctttcagtcttttgtccttgaaacctgtatcttcttatatactcctcggagatcagccagagtttgcattttctcgaggtgttgaagacaagtccttttcagagacagcatctttcactgagtctttgggttagcattcttttctgcttggatgttctgtgttggactgtagagctcagagtacatgcaggagagtgacagagaagcagacgtcagctaaaaattaagaatgacctcttagctacagatgatcggagatgggcggggctgccctgggaggtagggagctccctgtcatgagaggtgcgcaagcagaagctggacaaccaccaggaagaacataattgcagtgagtcctgccttggatgcccttcagttgtctgatgtggagtttctagatcttggtgccagtctggattagaagaggaagagagttgaggggttttaggtaatatttggccactcagatcttgcgctaagccacagcctggctgccactctgctctgcagctctgtgatgttggctgaacctgggtcccatcttctgacaatcggggaccgtagtgcctacgtggccatgttggcgttttcattgaccctcacacacctgccacccctgtcctgggaatacagtgagacaggccagagaagagccaggctcctaggagtttgcattctgccaggagactgtcatcagggttggagatgagactgacgaatgtgcttggttctgggcagcgccttgattaggcccaaggcaggcccagggtctggtagcagaaaggcccatggggtttccatagagaccaggccacctggagtcgcctctctagtccccaactctggcacccacagcagcgtcttcgcctcccaggggaggtagggggcacagctgcaggctgggcccaggcgtgtctgcccacctcccgtcactttaaatatgtaaactggcccgtcagggactgtttgccccctctttccagctgcagggcctgtcagtatgacagtcacctccacagtcctggccatgcctctggagcaccccgttaggccggcccatccagggaatttgtttttagagtccatttgtcatctctgtagcaacaacaaaaagatggattgctttcctgtgacaacggaatgcattttttcaggcctttaaaaccaatttctctaactgtaaaagtggtcccaaaggattaatcagaacacccaggggcagagttttttgtctgtttgacagcctacagtgtccttggtcctccagtcgctgggtccctggagagaggagatcagcggtcattaaagtgagaaacgccgcccatctgggtccctctgaataagcaaatggcttgttaaccagaacatcttctgcggtcggcaaatcctttctgttctctgggccgccaaaccgcattgagagcccatttctcaagtgtcactttggagccggcttcgggctgtgaaatgtctcccacaaagctgcccttggttttcttgaggctgatggaactttcatgcggttgttggttttgtttcggatgaggaggaatggctgtattttcacctggcctctggtaggtgtcctcttgtaattggaaatccctacatttctccttgggggctgggtttctgccaaggccacgttggaggaggatctggggaactggcctttggagcattgaaggtcagggaagccacagcaggagacccagttttgaatctgctgaatggcacttggaggatcaagttccctctgaggttgaagagcccccctctgaccttggttcaggggaatcacgtgggctggccttaccagcagatgtggcaactgggatctaagaatccttgtaaaggcgttttgtatccttcctggaaaactggagttggacataccttcaaggaaaaactagctgggcttcctgtcctggaagaggaagggcgctgggagagaacactgacatgcattcattcattcatgcattcacaatacagtgcagtgaatgctcacatcatggtatgagcaagactttttttggtatattttgctttcttgcttttgtttggtttggttatttttctaagcacagagcaggtggctcctatcggaaccgcttcacagaggacgtggacatcaagttggttttatagggatttggggcaattcagagaaaaatggatatgggctgcgggcccagggaacagcatgtgcagagacacagcagactgagagagcccagcctactggggacacagtgagctgccgggtgaccctggtgcacaggaggtgtggggcgaaggggttcagcaggctcggagttggttctgagtgctctcaaatgcagtgccaagagtttggcgtttcctggtagaagcctgcaaagtctatctgggaggccagttaggagatccttgtggcaacccagaggtgaaatatgacatcaacagtgagaatggaaggaggggtcaggtttgggagggacttcgggcatagaacatatggtatttggtggctggttgttagcgatgataccaacagcagcagtagtgagaataacgacctttataggcatgccctcttggctgagacccgttttttttgtttgtttgtttgttttgttttgagacagagtctcgctctgtggcccaggttggtgtgcagtggcacgatctcggctcattgcaacctctacctcccgggttcaagcgattcttctgcctcagcctcccaagtagctgggactataggcgcctgccaccatgcccggctaacttttgtatttttagtaaagaaggggtttcaccatattggccaggcttgtctcgaactcctgacctcatgatctgcccacctcagcctcccaaagtgctgggattacaggcgtgagccaccgcacttggccagctgagtcccgttctaagtgccctgtgtgtagtaataccatgaggacatggatggtaggaactatttttatccccattctacagagaggaacctgaggctcagagagtttaagtaatgtgtctgaggtcacacagcaggggaaatggcagagccaaatttgaacccagacacctggatctgtcatatctagagcagcgcaaatatggagactcaccaggtctgtgtgtgaaccaagagctttccatgtgactgcctggggcacggaatggcggggctattggagcagcaaggagacatgagagagaaagggctggaggatgcatttataaaagacagccgagaaggggaatggctatttattgctgttgcaaaggtctgtctcttaaaacccgagtcgaataagagaaggaagctagtgcattctggccgcacagacaccctgccagggtactgccttgtttatgaagaagaaacagtaaactgaaaacatgacctccagtgatttgtcccaacattaaataatgactagtttgaatttaaatatgtggcggaaaattatgctccgatcccttcctctggaaagggttcagggtgtttgattaccgaatgagtcatgcatattcatagctgtgctttcatcttgccaatcgggtcccctttgttatttgctaactttaagaaggaaagggcttgtgaagactgtgaaggtggcctggcttctcaggtcctctcccagggagagaaatgcctccagggcaagaatgagctctggctggagagtctagagagtggacttctcccctcgggagccgggctgggacgttgggtgtcaggcagcattctcatgtgctttgtcaaatttgagcctcaaaggttctgtgggtgaggatggaggtagacgtctccatttttgagatgtggaaactgaggcccagagacaaaggggcaaggtcacaacggctaatagggaatggggctgggcccacccatggtcccatccctgccctgggagacttcattcctaagattcatgaagttcaggtgtgagccactgcgccggctactgctgacaccttgattttagcccagtaagactgatgtgagacttctggcctccagaattgtaagaggacaaatgtgtcttgtgttagaccactgaggttgtggttatttgttacagaaaccatagatagctacacatcaccatatctatataggggtgagctttcttgtccttaaaatgtagaaaatatctttgtaggcttgctggcagcttccagtcaggaaagggatttgcaggtatggtggccacatggctgcatggctgtcatctccccacagcacacttggcgggtctcaatggaggaaactgacgctcatagcgcccagcagatgggatgaagtgggcaccgggccagcgcgtgcatccttagctcactcttcctgcttctttctgtgtccttcttccacttcctcttcctcctcccaccttctccttcttctcttgtgctcagcctcctcgcgctctcccctccacctgctgctgcctcctctctccttcctaacaaggtgtctcacctctcccatcagttatggtcccgttttacagccagaacctacaagctgtcctgccagagtcccagggctgggaggggctggattagggccagagccagtgttgcctccctccaagcctggtgctaccccctgcgagctccatcaggccatccagggtggaccaagggggcactgggaagggttttggggagacaggtggtgctggcaggctggtggggcctgatccaccgaatgggaagtgtggacttttggctgtggcagagccaacgctcatgctctcccgggtggtcacggggtcagccactcagcacactcaaccctgggcaatctctctggctcttggcagtagctcttttgaattccggctcacgaggattaacgatgacgaggggggtgttagctctgaagaaaaccccaatccttccccatcgcccccgtagagcccgggagagctttctaaagcgccccacggcagtgatgaatcccggcagaggcctctgaccccggcgggcctgtcgtcaggggtgcccgccgcacggatggatgggtttccttgagtcccgctgcctgcgctctgcggtgtttgtgcttatctgggattacgcttttctgtgcttgtgtgtcagcctccatgggatattggggacctcctcaaaggattatatggggccatttcagccgaccaacagaaaatcccagcaggttgcagatgagaaaaaaaaaatccccctttaaattggcagagcagctaggaaagcgccgaggctttcatttgggggcttttaagcaccacatgagccctgagcttctcccctttatacttgaaaaagatacgcttcgagtttggctctctcgacaaagcccctttcattttattcaagtctctgttgtttatggcggccttgcctggtcattatttttgtgggctcccccaactacccactttcatccacagctgctgctctaattattattattttttttaacaaatccaggctggatctgggcacgctggtattttggaaccaaataggccggttctacagttgccttactcgccctggtgactgcagtaatgagcttaggctctgagcgttggtgtcctcattcaagaaacgggagaaagtctcagtggacagcatgaccagtgctcaccagcacccagctcccttctttctggctatctgaacaaccgtcttccccagcccccttacagcaaggcatggccatgtgactagctctggccagtgccacgggggagtcagtggtgacagtcacttcaggctaggaccatgaaaagtccacatgcaaatctgcggtctctccccgtctcaacaactgagatggagcttctgttacatggggtccccgaatgactgtgtggagcagggctgtgccaacccactatggacaaatagcatgagtgagacagaagccattgtggtgatgggttgctgggacttcagggtggattggcagcaaaacctagcctatgcattctcaaatgtaatccctacctcacaacattgagatttgttgaatgattgaatgaatgaatgaatgaatgacataaaccaccaaccagaatgcctggctcatagtagttgtaaagcaaatgctaataatttctccacttgaaggtgcatgctatggaggtgctgcttgggttaatctactgctgtgtgtgtgacaacgtatcccaaaccctactggcttgaaacaccaatttattgttaaaacctatataatttatgggttgatagggctcagccagaaggcttttgcttggggtctcacatatggtggcagtcaggaggttgaggttgcagtgagccatgatcgcacccctgcactccagcctggacaacagagcaaggccctgtttcaaaaaacaaacaaacaaaaccaacagggtcaggtagaagtgcaaggcttcttatggccagtggagcctcgggagtcccagggcatcactttctgctgcaatcttttggccaaagaagtagctaagatcagcctagaatctggaatggaaatagactctgctgtttaacaggggagcagccaggtcacctgcagcagagcaggtgaggcgggaggtactgttgcagtcttcattggaaagcaggctgtgacaggtgcctgcagtcaaagggcaggaccgcctcctggcagagggactgtccatctagcaagggccatgagagacccggatgtcctgctccccttccaaggcccttcctcccctgtccccacactctcatgttccaggcagtggctcttccgtcttcgtgcctggccgagcctcagtggctgctgtgttccaggtggtgctgctgctgctcagagcccagccgaaacctggccaacctgggggcgggggtgggggcggccccaggcgggtaatgggaagccggagcagatgttggcagttacaggcaggggtgccgcttgccagccagcacaggaccactgcagctgagcggctgtaacttactttacagaaattgcccaatttcgaatgaataatattgtcattatggttaaactcatcaactccggcgatacctctgcccctctcgggagccctggcagaagaaggcgctactcggagactcattagtcatcaaccaaagtgctcttgttatgggaaatgaagaccaaatgggcatttattgaaatccatcctgacaccctccactgggaggccatttttagttagttcatttattgagcctctcttgagcacgtctgtctgccaggacctgggctaggtctggtgataccaaaatgaaagcacccaattcctgccctcacaatgcccccaggctctagaggaataaacaacacagtgaagggtggactaggctgtcagggcgagagctggtactctgccccctgctgcctcgggaagtgctctggcctcggtgtattcctgtctgtaggatgagggccatcagctacctctgcggctgtggcaggtcccgcgatcataaaagcttgtcacctgccacggtgtgtgccacagtgtctgcaagtggcctggagtgggaaataacgggaatgcaacttttggaaattacagaatggatggaggtctttccctctccctcagcacacacacatagccagcaggcagctgctgcccgaggaagggtaagcttcttgcttggctggaagccccgggtgggcctgctcccctccttggcactgtcctgcctgctccggggtgggtgtgagatcagagattcataggatgggacccacagcaaacagacctgcccagggcgcatcctggctctaggactctgggctcagtgcccttcctccttctctccctcccttcctaatttaggaagcccctaatttacagtgtcaagaggggcttcctcttcaactctggccacacacaggtgtttggggcagagtcttagtgtctatgagtgggtgtcttggagttcaacatctgggtctggaccacgcttccaccgctgttcaatgctcatccacgatggggcgagggtcacagtctcggtgtgcctcaatttcctcatctgtaaaccagcataatagtagcagcaaatccattgattggctctgaacttgaggtggtgcctcaactgcgtttactcacaacactctgataccaaaatgtcttttgcaacacatctccacctctgcaatgccagctgggtgtcccacagctcagttcaattctgacaccatccaccttgacttactatcagatccaggctcggtcccccatgactgttcccgctgcagatgccagtcacaagtccaggctggcacttctgctggattgggtcaaaactcagggggtttcacggcctcctcctcgtgtgtagtaattcgccacacagaactcaggagagcagtttccttgctattaccggtttattatggatacaactcagcaacagaggaagagaggcacgaggcagggcatggggtgaaagctgccacatcctctccagccgtgccaccctcgaagcacatctgtgttcaccaacccagaagctctccaaccccctcatctagggggtttgtgggggcttcattacgtaggcacggtggattaagtcactggccattggtgactaactccatctccaacccctcttccctccccagaggtcaggggttagggctgaaagccccaaaactctaaccctgccttggtccttctgggtaccaatccccatcccaaagctgtctccaccactccccacccccgccccgcaccagccatctcattaccatacgaaagacgttcttgtcactcttgtcactctggagattccaagggtcctaggagctgtgtgccaggaaccgggacagagaccagagaccaaatatctatttcttcttttgccacaggccagggatgtcctgtgcacagggcctggcacttactcagtgttcagttcagatttgctgccctggttctgtgatttcatcaacctggatgggtagggacagtggttctgactctagtattaatgcattaagaatgtttctcaagcactttctaggcaccaggcaccgtcacctgaatattctgtggtggacaagcccgacgcggactctgacctcagtggggctcttggtctggggtctgcagtcccctggccccatggggaatgggaacatgcctgacagctgctctttccctttccccagcctgcattcctgccacggcaacccgcggtttctcattgagactgcatcctcacaaaccatggttctagctggcgtgaggcagcactcatcctcacaaatttgactcagcatcctgttgtgtctttggatccagtgtctgctgctatcggaagacataagacaatgccacactgtgtgaggcagaaataagtatacgatagaatagatttgtgagccttgtatagagatatgcaatctaggatgtccaaaaatagggaagagagctttgaggattccggtgagattcacaatggccagcttggctggcatggtagacggtgtggttagcggctcccctctgcaaagagagcttcattttctggttgaagtgccgacagtgtgcttttgactcatgctgctttttatagggactcgctagacctgcatgtcagattctgtctgcaaagtgcccttcaggtgccaagactccattttttgactcagggaaaatgctgtttaattagcaggctcaaaaagatacccaattatgagttaaattgggctagaagaaactgttctttcaaaatttatctcctttcgtgctaaaacccatttccatccccttcagacaagctagttaatttcttttaacgtaatttgcaaaggacattccaggagaaatctgcgttcctttggaaatcggtcaagagccagcttcctttagcacctcctggcagggcgagggtggaagtttctccattgggcacccagggctctctgttctctgagcacccaccaggtacccttgaggtgcaaggggctttcatgtttcaggaaatggagcctaggaggggcttggactgctcaggccacgcagtgagcaggcagagggacttcagtggagagacctagaaagcagccacattcagatcatgaaggtctcacaggaaatcctggggttgggggtgaaagagtaaggggctcagctctttgaatctggaaaaagctaagcagaaaaccaccaagagccatgatgcggttgtgcaatcgtgaaagtgccacctctctgtgcctgggggctggcttcctccgtgagataaaaaatcaatgcaggcttaggtaaggaaagacttgaaaagactgttgaaataagggaggaggctattgcaataggggaggggactatccaataggggagggggttatggtagtaggggaggggctattacaatggaagagggggctattgcaatagggaaggaggctattgcaatagggaaggaggctacgcaatagggggagggactacgcaatagaggaggggcgattgcaatcggagatggggctcttgcaatggggaagggactgttgtaatagggaaggggactattgaaatgagagagggggctgtgcaataggagaggctgtgcaatagaggaggggctgttgcaataggagagggctattgcagtggggaggaggttactgcaatagggaagaggactatcgcaataggagggggctattgcaataggggagggggacatgcaatgagaggttacacaatggcggggggctattgcaatagggaaggagctgttgcaataggggaaggggctgttgcaataagggaggggcttttgcaactggggcaggtggttattgttaaagggaagggggctattgtaatgggagggggctctgccatagagggaggggctacacaatgggaaggaggatattgcaaggggggagaggctattgcaatggaagagggggctattgcagtaagaggaacattcgacattgagatctataagcagctcaaaggtcaggcagaaaggagttttctttcattgggaagcaaaagctccgtggaactggtgagggaggaggggtgagagctgcgttctgctctgtggtcagcggattcccaggaagggccattgaggaggggaactggtgtccaggatggtcagtggggatgacagttcagctaatcttttttttttttttttttttttttaatatggagtcttgccctgttgcccaggctggagtgcaatggcacgatcttggctcactgcaacctctgtctcccaggttcaaatgattctcctgcctcagccttctgagtagttgggattacaggcgtaagccaccctgcccggctaatttttgtatttttagaagagacggggtttcaccatgttggccaggctggtcttgaactcctgacctcgtgatctgcctgcctcagccttccaaagtgctgggattacaggcgtgagccactgtgccaggccagctaagcttttatgaaacagagtgaggaggtggagggctggggctggctttgtcctaggctgcccgatgatgccccagagaggttccgtgcttctgagaggcaggggcttctgaggggctcaccttgctgccaaagcaataaggtcacagtggggacatgtctttatctagtccctgcattgatgtaggagctgattagccccttctccctccgctgtgatcatgtgtcacaactccacatgtgggaaactcctcctatgggtggatggatagatgtccatgaaaaactcctaccttgggcaaggcatggcggctgtgtggggggcaatgcaggaggcatgggaagaggaggcgggtggtggctgtgtgcccctcgcttgtgcttttctgccatagaaacctccttcttgccaatcttacctaagctttccccatgaaaacctcacgcaatggcttctgtcttccaatagacataatattcttcaacctccagaagtgcagtccaaaggccaccataatccacacataaggtgatggtgttgggggtggggacaggggctgtgttctcccccccaggctgtgctcatgctgagctctgtgtcctatggttaaggtgtcactgccgcagcacgaggagccctgcagtgtgccatgggggccttgctggccacagcctggctgttgttttccattgcacggtgccgatgcccttgcaggcggcagggttgaagcaagggctcttgaggaggcagccgggagaagtgggccgatgagaggttgcttgcctgagtggagccttgttgagacccatcctccaagaacacaagggctgttaagtcaagagggaacaagtccttccttccgcaggcttctcatggccgccctgcaagacggcggccccagctcacccgagatctccacagctcttgagttcctgagtgaagtcagcctgaccccagaaggccccttctgcccttcagcctctgctcccctgccagccaggactgggagccaactggtgtggtctcccctagagcacgggtgaggactgaagtggcggtgatccacgtgccaggcacttggcacgggtgcttctctgcagcctcagaaacagcaccgtcccccgccaagcccggtgtgctccgtgcagatgttgatctttgggagacaggtttaggaggtggtgctgtcatgcagagacgggtggccgctggtgccttcaaaggggaagttggataaccccaggccccatgcctggatcacgaagccagctcctgacaccacgaacaccttggctgctgttgacgtctgtccctgcttccctgcaaactgcacacgtgtcccacacacccggttccattcaggtgtctcttcctgtgattctggcacagcgggggcaggtctcgcctccctctgagtgtccctggaatacagcatggatgacgaggggctgtgagaggtgaaattgcagggcaggtgtgggctgggtgtgcagggcgtgggatctttgccctagagcttcatcctaagagctgtggggtgggttttcttttttctttttttttttttttattgagacagagtcttgctgtgtcacccaggctagagtgaagtagcatgatatcagctcactacagcctccgcctcccaagttcaagcaattctcacgcctcagcctcccaaggagctggggttacaggtctgtgccaccacaaccagctaatttttatatttagtagagacagggtttcatcatgttgaccaggctgatcttgaactcctgacctcaagtgatccacccaccttggcctcccaaactgctgggattacagccatgagccaccacacccagcctggtggagtaggttttctaaaggtttaaaagcatgagggtgtttgtgtaaccctctttctttagcttctaatttgatcaaaggtggaaccagctgctgtcacagcttaccacaagcttaggggcttgaaacaacacgcatttatcttaccatgctggagtcagttgtccaaaatgggtgtcactgggccaaaatcaaggtgtcgctgctacagtacgaggaacccccacagcgtggaggcttccctctagaagcagtgatccacatgccaggcgcttggcacgagtgcttctgtgcagcctcagaaacagcaccgtccccacccaagcccgctgtgctctgcgtggatgttgatcgcgggagacaggtttaggaggggccacaccaatcggctcccagtcccggctggcaggggaggcagaggcctgggttgcacctgtgctcctctggggaaacctgggagcattgctaacccggggtccggtagagggaattcctagcctggcgtttttagattacgatatacatatatatatacacacacacacacacacacacacacacacacacacacacacgattaaaatgctatatattatgtatttcttgtaaatcaaatcgttctgtcattatattagcaacttttatctccctagcaaatattttgtcttcaaatctctttcgtatgagacttatggagatacactagtttactttgttagtttttgcctggtataactttccctatcttttcagttttaatgttcctctgtccttatattttagggtttgctctaattaacagcccaggctggtgggcaatggcatggtctcagctcactgcaacctccatctcccgggttcaagtgatcctcctgcctcagcctcctgagtagctgggattacaggtgcctgccaccatgcctggctaatttttgtatttttagcaggaacagggtttcgccgtgtttcctggtctcgaactcctgacctagtcttttagttttatcctagaagttttaatagactgcttaatgaagtttggagtgaataagtatctttatcttcctcttaaataatgcaaaggcctcccttaggatattttaactccaaaaaaccagctttgatttagatgctgttttgcctaggattttagttgtatctttttttaaactccccaaattaaacctcatttttttttttaagttatcaagcaatatctttattcaaacagtagtagtgcaacttaaacatttgtagaactcttttaaggttgtttttcactagatagtgagctattcaaaaaagcagggtcattattatactctctacattttaacctcatatgtttagctgggtatggtgctgcatgcccgtagtcccagctactcaggaggctgaggtgggaggattgctttagctaaggagccacaggttgcagcgagctgagatcacaccactgcactctagcctgggcgacaaagcaagactctctcaaaaaaaaaaaaaaaaaaaaaaaagtttaacatagctttgttttttgtttgtttgtttgtttttttagtatttattgatcattcttgggtgtttctcggagagggggatttggcagggtcataggacaatagtggagggaaggtcagcagataaacatgtgaacaaaggtctctggttttcctaggcggaggaccctgccgccttccgcagtgtttgtgtccctgagtatgtgagattagggagcggtgatgactcttaacgagcatgctgccttcaagcatctgtttaacaaagcacatcttgcaccgcccttaatccatctaaccctgagtggacacagcacatgtttcagagagcacggggttgggggtaaggccatagattaacagcatcccaaggcagaagaatttttcttagtacagaacaaaatggagtctcccatgtctacttctttctacacagacacagcaacaatctggtttctctttcctttccccacacttcccccacttccactcgacaaaaccgccatcgtcatcatggcccgttctcaatgggctgctgggtacacctcccagacggggtggctgccgggcagaggggccctcacctcccagacggggtggccaggcagaggcgccccccacctccctcccggacggggtggctggccgggcgggggctgtcccccacctcctggagggggcggctgctgggcggagacgctcctcacttcccagacggggcggctgctgggcggaggggctcctcacttctcagacggggcggccgggcagagacactcctcagttcccagacagggtcgcggccaggcagaggcgctcctcacatcccagacggggcggcggggcagaggcgctccccacatctcagacgatgggcggccgggcagagacgctcctcacttcctagatgggatggcggcggccgggaagaggcgctcctcacttccttgacgggatgactgccgggaagaggcgctcctcacttccttgacgggatgactgccgggaagaggcactcctcacttcccaggctgggcggccgggcagaggggctcctcacatcccagacgatgggcggccaggcagagacgctcctcacttcccagacggggtggcggccgggcagaggctgcaatctcggcactttgggaggccaaggcaggcggctgggaggtggaggttgtagccaaccgagatcacgccactgcactccagcctgggcaacattgagcactgagtgagcgagactccgtctgcaatcccggcacctcgggaggccgaagctggcagatcactcgcggtcaggagctggagaccagcccgaccaacatggcaaaaccccgtctccaccaaaaaaatacaaaaaccagtcaggcgtggtggtgtgcgcctgcaatcgcaggcactccgcaggctgaggcaggagaatcaggcagggaggttgcagtgagcagagatggcggcactacagttcagcctccgctcggcatcagagggagaccatggagagagagggagagggagaccatggaaagagagggggagggggagggggagagggagagctaaacgtcattattattgatttgtaactcagtgtttgtttagatcactccatatttcctaacaccttttctccctgttccttcttgcatgcagatatctttctgtaaaagtttcctttaacttttgaaattgattgtaatgaggttctgaaatggcaaatcctctgttctgatttgtggaccgattttctccgtctgttttctgtgctgtgattcttggttatgtcttcagctgtaccatatcactcaagaattctccctggcttcctttgttttcaacctcaattatgatgtccttaatttttagaaacaatatttggctcattttcagagctgtttattttaaagtctttggttcctattcatattttattctcacctttatttctttaaacatgtgaacatcattatctgataagtccaatatttaaagtctttgggggcctaattaattcctctctctattgtttctgtggttcttgcttacagagcctcatttcctggtatattttgtcatttttcatagtgaggtcatcatgctctttgaaacctgatctgcggggattctctgaggcctgggtcacacctgtgctcctctgggggaatcctgggagcattgctaacatggggtctggtaaagggaattcctagcctggcgtttttagatctcacatgcagctgtaagaaggctgcctcgagtttacacatctttgggagatatttttagttttaataaataaaaacttactaagttttagtaaaattcatatgtgtgactatgttgcgtgtgactctgttgtgtgtttgttgtgtgttgtgtgtgacttgtacggtgtgtgtgactgctgtgtgtgtgtcgtgtgaggctctggtgtgtgtgtgtgtacttttctcctcctaccacaaacaaggcagagatgggcaggtctctggccacagggtggctttagggactgatatggtttggctctgtgtccccacccaaatctcatctcaacctggaatccccacgtgttgagggagggaagtgagtggatcataggggtggtttcccccatgctgttctcgtggtagtgagagagtttcacaagatcactatggtgatgtttgtttgttggtttgtttttgagacggagtctcgctctgtcgcccaggctggagtgcagtggcgcgatctcggctcactgcaagctccgcctcccgggtttatgccattctcctgcctcagcctcctgagtagctggcactacaggtgcccgccaccacgcacggctcattttttgtatttttagtagagacggggtttcactgtgttagccaggatggtctccatccccgcctcggcctcccaaagtgctgggattacaggcatgagccgccgcgcccggcctatggtgatggttttaaaagcgatagttgttcctatgcccacattcattctctcttctgtcgccttgtgaagaaggtgcctgcttccccttctgccatgactgtaagtttcccgaggcctgcccagccatgcagaactgtgagtcaattaaaactttttcctttataaattacctggtctcgggtatttctttatagcagtgtgagaacagactaatacaaggccagttcatccttacaacaaagatgtcaccccctggggtcccagcttcaggcagagggattcttctaagctggctcctctccttggatttgtctcctgacccctacaccccatgcagatgtcaaaagagagtttcaagatatcccgctgagttaggattcatttcagccacgaataatgtaaaatctcaaaccagagtgacttaatcaggatagaagcgtatttctctctcaggatccagaaatctggaggaggtcagcatgggactggtttgatgttccttcgtgtgagggatccatgtttcttctttatacctcactctgcctggcttccacttccaacaaggtccagagtagctgcagctgtgccagccattgtctgcatatcccagtcgttggaaaggaggaaaaggggtgaagaaaggcatggtggtggttttgaggacacttctcaggtgtttcacacagaactcctgcttgcattctttggtcatattgagtgtatgttcaccctgagtttcgggggaggttagacggtgcagtctctattccacatggctgtattgggagttctgttcttcgaggaaaggataggtgttggggggcacctgccacctgctactccaggggtgcagggagaggacactggcccagggctagctcagctctctggatttctgcctccacttggggttttggtctccaaagaatcctgttttcttgcaagcttaacagtgcaccttgaaatatctgaaggtgtgtttaatccagctttattgctgtttccctattgctcccttcccatgggaaggatctgcatggtatttaggctgccatattgccagaaagaggccgtctccctggtggatgttttgggatcccttgctgtttcacatctgcctctgctctctgttccatttcattcccccacacattcatcacatacctgtggcttggtgctggtcctgggagggggtcttgggggtgaggagcagggggaacagctggattacagagacccaccccagcagaggctgcagccagtgggtggtgagcagagaacaccctccaaagcccacagacagtcccccaggtggtggtctctgtggaggtgacccccaggacctgcaccagtgaagttacagatgctgaaaggatgcacatgcagccacacgggggaacagaagagccaccggagcgtggggacaccacgtcagggagaggtgctctggccggttgcatgagtggagacggggactccttgaattccgagcattgaacatttctgctcccatgaaccaccccttcttgataataacttactctttaagactgagtttcagtgccttagatggaaagatcttacctgacaactctttgaaggtgagctacaggagagttattgcagtgaggagctcctgtaaataacaatttgctctttacaacctgccggagaatagagctagggttgtttttagcgatggagaatatccactcaaacccatttgactgtggattgcattcttaaatacttattcaacgatcgtctctgtggccgtcagactccagcgactttgattccactgttgaaacagttacacagtatcctggcttctcgttccgactccttgtccttcgtttctgctgcaaacggtcacctcccagacctgtaagcttcacctgttcctctcagaagtttccagagctcctctgtcagatgtcgggctgctaagaacatgtagctcctgaacctcctcaggaacagggaggtgcgtcctgtgccttgagggccgcctctgtgggtactggctggacttgccctgtttgggtctgcattatcctgtgctcttgggcatatgttcaccctgagcttcagggaaggctagacggtgtggtctccattctgtgtgactgtattgggagttatattcttcaagcagaggagggtgggtgacgatgccatcaggaagcaagggcagagcccctgtggatgaccccaggggtagcacatgcgggcaggcaatttttataataatgcacccataattacttttgcaccaacctaatagtgtcacagggccctgagctgttgaggatcctttgacttcattcctagataaacagagtggggacaacagctgtttctgaatttgttacctgataagtcctacactttatatgaagctttttctctgaagcgatttcactaccagccttcagctcagaggcagaaagcccccgtcaatttttctgccatctctttgccgacataaaaccctgatgatggatatcaacttttagtatttcattgacttcatggtctggccacaagagttacgcttatgaagctgcaggttcccaccttcaaaattgatctctctgtctttcttgtgttatcatttgtctctccttggccttttaatcatgaaaataaaaatatgtgttcagcatttcaatacttggatctgagacagatgctccacgcagacgcttttggagacttgctgtgtcctgaagccacgtggatcctcctggggaggtggagagggtgcgtcggggaatttttgttctgcagcctgccccgccaccttccagattcaacgcctaccactcttcctccgtgaagccctccataagccccctttgacctcccgccccacctgcctgtcattgagcgcttcttgggcacctggtgttacagcgatggcccatctcatccttacaacagccctgagtgtcaataattaataacaattttgtccacctcacagacaagattggggctcatggaaggaagcagccttttccccaaggcaactgcatccagtcatgggtagtcctgagaatcctgccaagtctttctggctctcttccctgggccacccaggagttcagagcagatggaatctcagagcagcatagttcccatgcttgttgatgagggggtcagtgttcaagaggaaagtcacattcccaggatcacatggccaatgagtagcagagataggtgctcctcagcccccagccccagggctgtctctaccgcatcagcctggaccccagagcgtcttggtggcatccttgaagtcacagtccccggctggccgtgagtgagttgcggttcccctgtgctttggtttgggctctcgcagaagcagaacctgaaatgaggatttgcagacaaataccgtgtttaggacatgccatgccctgccagggcatggcaccaagaagagaaggaggcctccacagtgcccaatagtcagcacttagtccctctgggcacccctgggagctagtgtatggcacacgcagttgtcccaccagagcaggagtgtgggtatttacacaccagcctccctcgtcacttcctgcctgccatgctccctggcagagctgccacctagcagatggcagtggggctggcaggaaatggaaatgataaggttcaattgccactcctcagagaaggctgccggattgcacaccccaggatctccggaccacgtcactcagtttcatcatcgtcagggccctttgaccacctgaagctaccttgctcattaccgtgccctggcttattgacacagaactcaagctccacataccaggggccatctctgtcacttacttgctgagccccttgtttcccaggacaacacctggcatgtagctgtcactgaaaaatatcagttcagcagaagcccagatcctttctgacaaacatgagggaagtgggcatcccacacaggctcccaggaagaggtgttcaagatgcttgccagccagggacagggcactcagtgacagggacagaggcagccagcacctggaggtgcccactggcagccccagtccccaggacctgatgccaggcttctgtgccatctgtgggctgccctccggtcatgcccacaggcttcccgctccagggacatcacatcaacttggcttgcacaccttctgttgtctgtggctcagcatttgccgagcatctgatctgtaccagattctgcttggggccgggcaggatttgtcacagtcctgccctcagggagctcccattcaaagggagccgctcatatgtgaacacaccagggccagcatcaggcactagccgagcactagtcatcctttccaaagtcacttcccaaatccctctgtgcccaggcctgcagtggacaataggggtgaacatgaggttctgagcggtcctggggagtctcaggcagtcccactaaaagcactaacactcaggctgcatgaggggctggtgaagggttaagggcacaggcgtggggtcagactctactcactggctgtgtgggcttgggctctgatgcttaacctctctgaacttggttttgttgttgttgttgtttttcatttgtttgtttttccttttcaaggtgagtaacaatccttgccttgcagaactttgaaaggaatacattggttaaaatctttcagtgccttacatacagtaaattctaaaccagccaaagtttctgttagcaccgtttctcttcctcatagctccgtgcttacctggaggcactgccctgtggatcaatgtggcagtcaaggcgcctctatacagcccacccggccagacctgttctcagccatcctcagccctcgtcaactgccaattcagaccctcctctgtgacctcccccgtccagcccctgtggtttctccttggtcagtcctctctctgccatgtgagaaaggttttcctcctcctccagactgtgagccttgcagaaggcagggaacacgtcctgctctgtgtccttggcctagggcctggcacataaatgaccagaatggaagggtcccagggccagtgtgacggggaaggtggacgtgagctccagagagcggctcaggaactgttcaagccacccacccccaccgcccccatgacccgggacctccggatgggccttgggatgacaagggtctccgctgcgcactctcatggtgacttgtctcttgtgtatcagtggtcagcccctctgctcagtgtgtggagtctgcctaaccccaaactccaatgccatctgccctgcactttgcattttatttttagcgaatgcagccgggcaccctattttccttcattccttggcagttgtgctcggggcggatagcgccagtgaatgtctgaccgtaatcatccacaggccagttttcaatcatgaggttgatgattagctcactaacaccctctccccagaccgtcaccttggggcccccagactaattactgcaggacgcgctgagtaaagttcacaatgccagggaattggggggaaatcttatcagctctgaaactactgaacagcaaatgtgttccgaagatgcaattagccgcggttggaatgggagattgttggagagggactttgtgggagtcacgcccacccctccctgccacatgtgtcctctccacacgtgagatgctggtgtcaagttgccagttaaatgaggacactcatgagggacgaggatgtgggctgagctccagaggactggtgtttccttatctccatgggaccctgtcctccaccagggcccccagcccacccctgtctgtgcatacctccactgtcactccaggggagctctgcacgaggccccccgggttcattgcatggcacattggcagagtcaacaccgggccggggacgcagacgagcagacctgcccttgtctcaagaaacagccgggccatagctgaggtctttccacctggggtggggcttgggggggtccttaagtaccttaaaaatgcaggcagagtggtgtggagggggcacattctgtgctcggtttttctaggcagcaaatctgttgattccatcagattcttaaatggtttagaaccaaaagggtcaggagcaattgatctaacaaaggggccaacaagtaagtagaggatagtccagtgcagtcagcactacgattggtaaagtcccgggagccaaggtgggtggaagagcagccccgatcctgtggacggggatggggaaggggaaggcaaggaggatttccaagcaggggctccccgtgatgggcaggtcttggtgccagggactttcagattcagtcatttagttactggccattcatcaacatctccaggcatcagcccactcccgcacgcgtgcagacacacagacactgagaacggagggtggcactgcccatctggcaccacagaactaagcaggatggcctgcagccaccatgcagcccagcacccacacgtctacatgggcgcccactgcagctactgaggctgtgaaaagcaaaagcccacatggagccagtgacagctctttctgaaagactttagctggtaaaggcagaaaccatgacctcagcaccttgcaggtggagctggggcttcctggccttcttctgggtgttggatgaagctgcagcttggaagttagcaaaatccaaggagtgtagaccatgaagccagagagaccaggctcaagtcctggctgagatgagtggggttgggtgcagttggacagtcatgggacctacctgcacatagattccttccgccctctcagccccaagggaaaccggccgaccagcaccctgagactgcccagcacggtgcccagcccaggagctgttgggagcaggtctctggtttgtcatccattgttcatgtcttcatgtggatctgaaacatcacccaaggtgtcagccttcagggccccctgaaggtgagccccaagaagtggggaccctcatggctttgtccactgcccaatatgtcaggatttgtttccacgtagccgcaggtaaaactggttgttaggtttttaaatgcttggggaaaaattcaatagttgcaaaaatgagaagaataggaatcctccatggcacatgaaaatgacatggaattcagtttcagtgcccgtgaatgcctcttgctggcacccagcctcatacacttgcttacacattgtcaggggctgcactggtgctgttaggacagaggccataggcctgcaaagctggtcctctccagacaggcttgccgagccctggctcaggctctgtggatccatgccgagaggccagggaggccagtgaggtgctgaggaaggatcggccccatgcccagctctgggctctgccgtgggttccggtttcatctgatgtgatggggaatgtggtgtgggacagaagaggacagcggaaggtgacacatgtagctttgcaggggctgtgggaggagtcatggggcctgggtggaggtgctggaggctgacgggccgagtttccggagctcagaaggctggggaggtaaaactgagcatcatcagccaggatgcgggagtttcatcctgaaaacaatgagatcactcagacaggacacaacaggaatccaaaatggcttttgggaggtcacaggggtgaaaggacggtggcttgggtctggggggaaggagaagggcatggagacagggtgggacaactctcccagtagagctaggacacacgcctccgccacatcccaggcaccctgccgtgccctccggctgcctgctccctcggtccttctggccacgatgggggtcgggggtctgggttcatctccatctccttaaggacaggcctctgcctgagtcaccggtaacactacatggggtgtggccgggcttgggctgggggaaccagtccccagcccaccaggggcctctacttgaacccactaagaccccagcctgccctgctcccctgggccccacgcagtgactcggctgggtgtgctcggctcctgcaggagctcttgccacctgcctcagccttctttctggggcctggtctgctggaagggatcaatgtcaataacaactgttcatgttgccacagagaattccaatccatgcacactctattatgctgtataatcccaccccacaggagcttcgcggacgtgggagagaatgaacgttaggcctggtacaaagcctggcccacagcaggcacctgaaaagtgactgcttagctttggaggggacaggtagtgggaggagatgggaggggaacaagaagaagggctgggggaggagacgccattcttcgagccgggcaagggccaaggccaacagcagggactggctctcgggccagtgctctccccaactgactgcaagcccctctctctccacctctttctgcggggaggagccacaggctctgcctaccaggaacttgaggtcccaggcctgtaggcctgcagagctcacagacatctctcctctgaaggaggtgtcagccttccaggcagagggagcatttggtgaagggctgaacaagcatcggggcatcccagcctaggtctgctgcccaaaataggtcttcctggttcccactgagaaattaaatacatttgttgatactctacgtctgcagaaaaaaatgcaaggaggcccaataaactaacgaatgagacagatgagagtgattgaggaagagtcgcgggcgctgtctgttcagcggggctctgcgtggccaggtgccaggaagctgccagcactgcagggacccagctgagaatgtcaagggaagcagggtaggcctgggccgccctccacccagaagcaataagtccccattcactgaggtgtaataaggcatgtctagcaactaaggagcactctgggccccatgtgaggataactccaaagttagccttggagaaagtggcccactaaagaacaaagaagcacatgcacctcacatggctcaccaagaatgacccgtggagacactgcttgtggagatatctcccacactggacaaccgattccacactctctcatcgatttcctagtgtaagctgctactgaatgcccaggtgtgaggccctggatggccagcctaagccctaccatccttacacttgcagttcatccatccacccatctaccatgtgtctaccaatctatctttccatccatttatccatccacctatccattcactcatccgccatctacccatatacccattcaccatccattcattcaccatccatctatccacctatccactcatcaaacatccgttcactcatccattcattcattcattatccacccatccaccagccatccatcaatccatctatccatccacctattcatcaatcatacacccattcaccatcattcacccataatccatttatccatccacctatccaccaaccacgatccattcatccacccacccatcaccatccattcatccatcctcttacccactgtccatccatcccatccatccctctacccatccacccatccaccatccacccatcaatccattcatccatccacctattcatccacctattcaccatccattcccccataatccacctatccgtccacccatccactcatccatccacccatccactcacccatccatctattcatccactcttccaccatccacttatccatcctctcatctactgttcatccatccatccaccatgaatccatccacccatccacctttccaccatccacccatcaatccattcatccatccacctatttaccatccattcacccataatccatccattcacccataatccataacccatccacgcatccaccatccattcatccacccacccatctattcatccactcttccaccatgcatttatccatcctctcatccactgtccatccatccatccatcatgaatccatccacccatccacctatccacctatccaccatccacccatcaatccatttatccatccacctatccacccatccaccacccacccatcaatccatctatccatccacctatccacccatccaccacccacccatcaatccatctatccatccacctattcatccaaccatacacccattcaccatcattcacccataatccattcatccatccacctatccaccaaccaccatccattcatccatccatccatctcttatccactgtccatccatccctctactcatccacccatctgccatccacccatcaatccattcatccatccacctattaatccacctacccaccccattcaccatccattcacccataatccagggactagctctcgagccagtgctccacccatctgttcatctgcttatccattcatccatccatttattcatccatccacctattcacccatccaccatctctctgtctacccatccatccatccattcatctactcatccattgtcctccatctgttcatccatctgccatccattcactcattcattcattcattcattcatccatctgccttccttcactccatattgatttgtcagagatttacctggcactgctgtagtttctggagatataacagtgagcaagagagacaagaccctcctatctggaacttaagcttgaagtcagggcattggacaagttgtgtactgcacaggggcaattagctgaggacaaatggggctatggagtgaggtgccttggcctggagaaaggaaaatctttttcctggtataagggggttaaccattctccaggcatgtgccagggagggagaggtgccttttaaaatgtgggtaaagtctttgaccaggagagcagcagcactgttgcaccctggggtgatctaagagggacatggttacatacctgccctctccccagtcccaccacctccacctccactcttgccacatcaggtgttcctgtgcctgcccgtgcttttccatcacctgaaataacttcctcccacggtagatttccccaactgttcttcatccttccagtgatacttccaggaaactacagatccctggggactaggtggctcctctgtgctcccgcagacctgagcttccctcttcacggtgctcatcacttaacagtagacagcaaggagcctctgctggcctcacagctgaccaggggtgaccaacagcctccaaacccacttcagtggctccattctctcatagggctgccagcttaaacaaagaactttttaaaggatgcacagttaaatttgaattttatatatcaaccagttagtttagtatatcacaaatattgcatacttatactaaaattatgtgatgtttggggcatacttattactaaaaaaagttacttctttattggaaattcaaatataactgggtgtcctatattttctggcatccctagcttcagctggactctagcctataggaacaggttttcaataagggatggagcctggcaggtggccctaaagccagtatagctggaatcatctccctgagccctacatctcatacctagccaaataattaccttcatctggaggcttctttgatcctcccactcctggctgaaaaaggtgcctcctctgagtgccgctagccaacccactcacatatacatacacacacatccatccatccatccatctgtcatctgtccattcacccatccaccatccacctattcatccacctatctacccattcaccatccactcatccataatccatctatccatccatccatccacttatcctccatccatccatccacccatctaccattcattcatccatcctctagcccctgagctacccttcatccaagtggggtggtcatgtgtctttgtcagacacccaccaccctcaaggtgatctcctcccgcaaggacccagacagacagaccctaaggagccccgatctctgtgggttggttgggtcacaccaagcccaaaagtgagtgcaataaagtggcctcagccctgaatggatgttttttctgcctaattataaaaatacattgcaatagaaatcacaaaacagaacaacttggctattacagggacatgctttatactcataacttaaagagcttgttttaaaaactgactataaaaccatttaattacttggttttaaaaccagccatgtggaaattatgttccctcgatggacgtttggaggtgatttctggcagagaactctgcgatggtgcagactgctccaggctccctggggctgcctgacatttgcacagccccacaaggcccctgagccctctcttggcccttttgagctttgcagggctccagcaggtggacaattggtcactcttctctccacaccaaaggtgaggagcccagggttcagcaacatggacctcgtggtgcctggtccagcagctagtccaaattgtggccaggccagaattctgaatattttgactacaaaccctgtagtattctatccgtccacccgccatccaccatccatctatccaagtgccattgatctatatatttatctatccattggttatctcatctatccatccacctactcacccatccatccatctatctatacacacacccactcaccccattatccatccacccacctatccatgtgccattgatctatatggtattcgtctctccattggttatccatcaatatatgcacctacccatccacccacccacccgtgcatgcatacaccctttccttccatccatccagaaaggctttatagagctcctcatatgcctagtttctgggcaagcaggggtgtggggtgtgcatagaatctgctgtctgacgtcaaggagctcacagcccaatgagactctgaaactactatcctgacgtagagtaagttctaagtggaggtgtgtagaaactgccatggaaccatggtgggggattgggcacaagcgtggagcaaggagtgcttcatagaggaggagacatttgagttggcctttggagggtgtataggagttggccatgtggaagaagggtcagatattccgagcaacttttagttcaagttcaaaatcctgaagctcagaatctgacttgcccctcatgggctgtgtttctagggacaagccttggtgattttggagctcagtttcctcatctgagaaagggggagaagggggaagaagtgtgcttcctctgagccgcctaccggtgccgccccagctctgcctcaccttccagctggggctttctttctgggattcgcagtcaggagtgggatgctcgcccatccctccgtttttccctcttcctccatgaccctacccaatgtcatggcttcagatattatgtctgcacccccaccactccccagccctgatgccccaatcaaagtccaaactcagatctcctgctgccccatgacaccccctcggagggtggacaggcatccctgattcatcgcgttgccatcggaactcttccacctgcttcacagaagcctcctccgcaggctcctctcaggaagtggtcccatcccccttcacgctaaaaactcaggggtcatccattccccctctatcccctcaccccacctcagatgcactagtgaggtctgtgctgcacagtgagttctccaaaccacgagacctttgtccacatttcagccccagggcccaagcacgcccatcttccagggctttttccaggaccccagcccctctgtctgccctccactctgcacccggaggggcattcaccagggaaatcaggttgcatctcctctgttcaaggcccccaatggttccccatcccacattgcaatcagactcctcacgaggctcccgggcccgcactctgcctgcctctccgcccccagcacgttctgctcgccccttcatgcctccagcttcgggactcctgtggtttctccaaacgccaagtttggtgcctcaggacctttgtgcatgctgccaccctccctagcatgtgccctcccctgtgcctaggaggcttttctgcctcaggaacatttttccttaccctcctttcccaggtcacaacccccaccccaccctaggacttgcatcttattaccttgctttatatttgccgtggtttttttcactatttgagagtatattattgcttttacttattgtctgagccatgtgcgcaaacacacacacacacacacacaaacacacacaccaccgtcctggaagtctcgggcgggggcaggaagctcacctgtgccatccatgcctgtgtgcacagtgcgggggagactgctggcacccataggtcctcggaagcacctgaaatttctaaccggcaaatgtgagagtagatgcttttctctgaaaagtacaggtgtcagacacacaatctgtgatgtgcacccaggtcctgcgcctgtgctacgtgtctctgggcaagttggtgagcctctcagagctccaggaagctatcacccctctcgagggtcagctacgagggttcatgagacaagatgcgtgtgccactcggcacctggctaatagaggctacccaatacttagctacccttaagccagtggcagcgaatgatggccaggcgtaagggattcatctggccagtctgggaagatccaacattgtttccctccattagggcaaggcatcttggagcatttttattgggaagcttatccagtaagtccagggagcagagggcttgtgtgtccttctggaagtctgggagcgtggcttccccagacatttcccttaaaacagtccggaagcttctggccagtaaaacctcactctaccctgcccactccacctcttcagtccacactcagggacatgagggacagtttccagatgtgcagggtcttctgccctggaattggtattaggcaggcaggggtcccagcttggtgcccaatgactgtggtccctggagaagcggccctgcctccttgggtgccagtgtcccgacagaggttggacttgatgtgccctccctctcccaagtccttaggacaacaaccttcagtgggtttccctgccttctctctcaaggaggctcggaggctctgcagtgagcccaacacacaggtatcaggccgatactcacgtggcatagtgcccgagtgggaagggacggcctttaggagcacacgcatgtacacgtctgtgcacgtgttcatgcgtgtgtgacgtgaaacgccaggatgttgccatgagaaataaagagggtctcggcacagattcgtcagcccctgcccctgcccctgccctgtccccaggcacctggtctcgctcactctagaaacagctgcatctagttacacctcttttttctcctcctcctccttcctcctcctcctccttcctcctcctcctccttcctcttcctcctcttcttcctcctcttcctccttcatctgctgggctggggaccactgggcgtttctcctgagcacccccagcacctcttctgcggattgcgatcttttggagcagaatgatacgggattcttacaggtttccctaatcagccatccctcccacaatatcaccatgcattgttttctttggtctaaaaataggagacgcacagttgggctttgttgggaacaaggcatcttgctgtgttacgtggatgtggcccatgtgtggctgcgagtgtccggcagtctctcagctttttagggtcccagctttcacaagacatcctgctcctgcctgcagcccacgctgtggagtcccaccctggggatacagccctggccattcacccccacatccatcaggcatctgtccatctgtggactgcctgggggagggtgcaacttcccaggcgaggggctcctgtcaaccgaagcagattcctggggaagcgggcagctgagttgtgggcaaccaacaaaaacagtagcaggatgtgcggcagccacaatgccaggctccaggcacttgtcactatggaggcggtgggtgttgggtacacacactccatgtccctgacaaagctgggtttgtgcagctccccataggttggcctggaaggctgtggggcaggagctctttgccttcttcttgcagactagaaactgaagctgaagctgaggccagggctagtggtgaaggcgctgagggtctcacggtggggggtctcccctgcactcagggcattgtctccgacctggacgggagggcagatcggtctcctcttctcctgctcctcggccacgaggtcagccctgagtattccaggcccccgagtgccccccaagtgcccttctcctgctgcgacccctgtgttagcccaccaccaagaggcccagggaggcagtggctggcaggcacgggggggttgccggccatgaggtcccagctggctctgagaccacagctgctgaccacaaggagggggctcccagggcctcttgacctcaggcacctcccctgctgggggtaggtcatgtccatcctgggcagtgtgaccaggcccagcggagatgtggcagcccgcccagccctgagccccgcccagggtggtgtgtgggaagtaggggcacagggtctttcctgggttccgaagccttcctctcccactccctcccggcatctcacacccctccctgcatctacaaatgtgtgtgtctgtgtatgtgtctatgtgtgagtgtttatgtgtgtgtctatgtgtgagtgttatgtttgtgtgtctatgtgtgagtgtttatgtgtgtgtctgtgtgcatgtttgtgtgtgtgtgtgagtgtgtgtctatgtgtgtgtctgtgtgagtgtttatgtgtgtgtctgtgtgtgtttatatgtgtgtctatgtgtgtctgtatgtttatgtgtgtgtctatgtgtgagtatgtgtgtgtgtgtgtttgtgtgtctgtgtgtgtatatgtgtgtgtttatgtgtgtgtctatgtgtgtgtattttgggggtggtggtgatcagatgaaatcagaggtggtgaaacatatttttaaaacatgaaaacacttttgctgaacaaaatcccacacagaaacccagtcaataaatctaatcaaagacaggttgccggggtgtggcacactgtccaccgagcttccctgtcaccagctcggctctgtctgagacaggcgacctctgggtaagatgctcacctctctgaaaagcggggctggcagcagcctggcctctggggcggtgtccagcctggcgagagcctgctggtgctgctgcccagctatgatggttgagatgatcactgcctggcttggtgagctctatctgcttgtgacaacagcgctgtgagttattaatcagtactatcaggactgatatccgggtgtgcgattttactgacattctggcctcagtaaggcctggaaatacccacgtcctgccccagagcacggcccctgggggaattgccacagagtagccacaaaaaagccaggatccctgcgctcctcagcaggcctgaggcacctccttctcccctcacccagcccctactccaacctgtagctcgggtgggaggaagacagggagcaagaaggaggagggtgacccacttcaaaaggggcaggatcgaggcccccatagactacagaagtgactcgcggtctcgccactgtatgtgcatggccagaattccttgtagctttgcagggctctgaagccttttattctgtgccttgcagggttgagcttgttataaagaaaacacttgcacaggcagcgaggtagggagcctcttgccactggaggtatccaagcagagaggccggggcacaactgcagtgattccagcatcagaagatgtgctggtccagccggcccctctgctgctgcgtcctgcttccaggcatcactgtgtctggagtcccaggcaggggctggactgccctaccctgccttccctgcccaccttcctctttgcctgtgggagggcgcctggccgggctctgtcatgagtgctctggcacggagtcccagggggcttcatgcaggacggatatctgttcttccagatctggaagaaccagtgctgatgcttctcacaggaaaccagagcttcaggtcacagtggcctccacgagattgtagagaacccctgggaaatctcccactccagagctctttccccgagaaccttaattaaatcatctttcatctgtggtaggaaggaggagaataacttgacaaaacagacactcatttttcctgctgtgccattgttcagttcacccactgctcatgatgcgtctgctctggggtccgccctgtccagaccccagagccactccctgccactgaggagtggaaacgctaggactgactgatgaccgatggcatatggttagagggcagatgaaggacagaagacggtgctacctcccaccccatccctttctagggaccattacccccccgactggcagccagtggtgcccagggacaccgataccccatcgctgataatcagtagtcctcagacacaccaatgccctgccttttacaatcagtgacactcagagacactgatgccccacctttgacaatcaatggtaccttcgggagacaccaatattcctgccattggtgattactggtgcctggagacatccatttcccaccatcagtaatcagtcacactcagagacaccagtaccccatctttgtcaatcagtggggctttgaaagctcaccatgcttgagctctcggtggctggcccgtgacttctgcagcactttgctgtctggtcctccccctgcctctctggccactccttctcagtctcttctcagccatgaggaaagtaccaggtgtctttggttcactgtttttcccccaatgcccaaggtaggagccgggggccttccaaactccctgttgcccgacctgtggcatccagtcctgctccttccaccttttcacatctcctgcggctgtctcctcctccccatcccacggcgtcctcgttcccttcctgctggattggtcacctgggcacctcgctgtctctatggtcttaccccactccccctcttgttcagtgaccgagcccttgctggggttcacggctgccgcttatgcgctttgtcggtctttgcctgttcactagactgtgtgctccatggagccaaagacaacgaggttgttccttgctccacccccagccctggttcatgcaggttcaatggaggctgaaatcaagagcagaggaagagcagcgcgcgtcccatatccacctctgcagcagctgtcagggctctaccccaccaacccctaagccactgggtggtgactgccctctctgggactcacttgcttggggccattcaacaaggataataataacaactacttcatcagagggtggttgaaaatatgaagaaagcatttggtccagtgcccggcatacagaagtgctcaataaatgctatgcacaactatttgttaccagtattgctgtatactctatgcagtagaagttcttcattcatgcccaccgtgattcaagctgctatcactgcagaccctgactggggcttctccagacagaagtgtagcttccccacccaactctgaggagcttacattcacgggcctttcttattggagtctatgaccacggaatacaaatggtccctaaatggatgaccatgaccttggccattcaatgcagaccttgtctcatgttttggcttcagacacctgcttcatgggaacgataagggaatgataagaaaacattaagaatggcttctagttgaagctgatgcaagattttaaccaatttgaccagcagccacaatactatcttggcttctcatcacaaatatttgaagagacagtcttaggagattccacagttatttccgaaagctgtcatcttcacccaggaggctgccagcactgctgttgaaaaggcctaacacaaagctactgagatacattcccttgccttccactgttcaattagggggcagataaatgaacaaattgttcacacgtccaaccgtacatagttaatgcaaccatcctgataaaagacaatcttccaaaacaccatcactccagagaattagccgtctgctgcactctgcccaagcaaacaggctttttagcattgtctgcaaaatgtcctcagacaggcaaacaaaacacgattaaaccgtattcactctagagcctcagcgcaaaaccccttaagagaactgagatcatcagtgatcatggaggaggaggacggcgggggctctcgtctcacaaatgctacacacaagatcattaataaatcaaggctacaaaatatcgatgatgagttattttatatgctctgaaatgtatttgccttatttagttattatcgatcagacccaagattttccaagttagccttctggccaaagagaaaaggtttgccttgccattaaatttacaaatgttctcaaggatgtttcctggcattttagcaattgtcaggccagtaattaaaacagaaccagctctttcctgacagtcaattctgtaatcgtgtttgagtggctgttttactaaattatattggatgcttgtcagctcaagccctggtgcagaggctggacgccagctccgagtcagacagagctgggtctcatgccaacatcatggctcacaaattgtttggtcttgagtgggtcatctcaccactccaggcttctgtttctttgtctgtaaaagagagacaagaacatctcccacatgtagcattgtgagaatataatgaggactgtgggggctagtgcctagcacagagccaggcacacagtcaccgtctctcaacccactagaaggagttcaagttcaagcagagacgagcccgggagccagaagccactggtacccatgccaaggaggtaggtgcaggagccgggttgcatggagatggttacagcaggtgggtacgatggtcactggactcaaagcacccagcactcttcattaacccttacagtcactccccagtggatggatggatggaaggacggatggaggggtgagatgaaggaaggagagaaggaaaagagcagggaggaagagaaggagggagggagggaagaaagaaggtagagaggcaggaaagaaggaacggaggaaggaggggaggagagaggaaaagaaagagttggactgaaagtatttataggctgggcgcggtggctcacatctgtgatctcagcactgtgtaaggccaaggcaggcggattgcttgggcccaggagtttaagaccagcctgggcaatgtagggagaccctgtctctacaaaaaaattaaacaaaattagccaggcatggtggtacacacgcgcctgtggttcccagcgactcagaaggctgaggcgggaggatggcttaagtccaggaggcagaggctgcagtgagctgagatcacaccactgcactccagcctgggtgacagggcaagaccctgtctcaaaataaataaataaatataaataaataaataaataaaagtatgaaataccgaccattcatagatgacctagcaggaaaccttagtttgtaacaggtgtcttgctaacagactttcttaagcttttgcttataaacacattcctctttcataaaagtacattatttattggattttttcctaattacaaatgtaacactttcattttaaaatattgacttaacaaaaatgtatttagtcattccataggtgtttcacactaggccatgtggtacagactaggaaatgtagccagaaacattctccaaagaaagaaaaatgtactatcgtctcgtcacccagaaacaaacagtgctgttaaccttccgggctgcttcatgcctctgtctctatagattcattcctacatatgtacatctctttctatagcacatacatatatttgtgtgtatcatatgtgtgtacgtatttatgtacgaatgcatgtatataaacacataaacacatccacattagtcattgaattacctgattttatcttgttcatggaactcactaccatctgaaatgatcgtgttcctgcgtttgttttccttcctgtcttttgcactcagctgtaaggccatgggagggtgatttcatcctgtcccgtcttgtcctgtccacagtcataacccaacatgtaatacagtccctggtgctcagtgcctaggtgctggctcaatgaatgaaaaattcgagtcccagtatggtactgttccccatcctcatcctcgatgataatgattctcttgacttttctcctttgtaagattttatttattttttattcatttattttattttgttttattttttgagacagggtctggctctttcacccaggctggagtgcagtggcatgacctcagctcactgcaacctctgcctcccaggctcaagagatcctcctgcctcagcttcccaagtagctgggactacacgtgcgtgccaccaagcccggctaatttttctatacttggagagacagggtttcgccttgttgcccaggctggtctcaaactcctggactcaagcgattcacccacctcggcctctcaaaatgctgggattacaggtatgtgcctctgtacccagccttttcgtgggtttttaaaaattccctcagctaagcagaggacagtgggaggcgtcctgctgagaatgccaggccttacatatccctactcaggatggatgggtgatgctgcctgcccaagccctggcatcagtctgcttgcctcccaacatgtttctcagaattgtgcatgaactcccatgccatggggggtgaatggggccctcgtccgcctagttgagaaaatctcttttaggaaccatgaatgctgacagatctctccaccttggccttgccctgattcccatttggcagagagcttttatttgaggggcaaagctctcattaactcataatgtgcctctgttggctgaggagccatgaaaaatgccttagcaaaattcctgggtcttggcagggaagaggttaggcagtcttaagaccttgggcaggctggaatgaaggcgtgccctcggtccacacaagagaaggtttcagatcaactcgttttatttggtaaaatagttctagatccagccattcaccagtgttggttagaaaccactttcggtatctggtggaggaaggggtttgacacaaggacttagaggcttccttacatagtagacactgcaagtatcaggaggtcaggcacgcaggaaccttgagaaacagctgccaattctcagctcctgctgcacccaagcgggggcctggcgaggacgccagagaccctggcacagccccgggcctgcctgcagcagctgctggagaacaaggtgtctccactcttgtgcctgtcagcggtcatgtgaaggcagcttgggggtagagtctaagggaggcgggggtgtgtggtctctgggcttccaggctcctgggcttcaggtggggcttagaagggctgagacatcagcacacagaacagaacagaacacaacagaacagaacgccacctccattaaatgttaaaagttcggccaggcgcggtggctcatgcctgtaatcccagcaccttcggaggccgaggcgggcggatcacgaggtcaggagatccagaccatcctgtgaatggagaaaccccatctctactaaaaatacaaaaaattagcctggcgtggtggcgggcgcctgtagtcccagctactagggaggctgaggcaggagaatggcatgaacccgggagatggagcttgcagtgagctgagattgtgccactgcactccagcctgggcaaaagagtgagactccgtctcgaaaaaaaaaaaaaagctagaagtgagagttaaatatatcccatcagcatgttcagcagcactgagctcgtggcctgagcaccgactacatgccaggtagggcttgggatctagcagtgaacaaggcaaccctgttccctgaccatgtggcctcgtgcgggatcggccaggaagtgagcacaataacacaaatggagggggtggggagctggggcttcccgcggtgggagctgcactttggggtgatggtaaagctccagagaaggacagtggtgatggttctagggcagtgtggatgcctaatgccactgaactgtacactcgagaagggctcacaagggaaattttatgatatgtctgttttgccacaataagaaataataatataaaaggatgttttcagagaggcttaataattgctttttaagacaaaggataatcaggagtcagggcccacttagatggtgtgctgaggaagggcctctgagacggtggcctcggagctaccagctgtgggttaggaggagctggtcatctggagttcccttccctcgctgttttgaaatttcaaatgtctcacctcagaaaacaagtgggtgaggcgacggctgtgttgattggcttgatttaatcattgcatgttgtgtgtcgtatgtatgtatatacacatacatatatcaaaatagcacatcgtaaccacaagtgtatacaattatgattggtccattagaagtgatattaataaaaataaaaataaatttttaaaaagaaggagccagccacacagcctccgggaaggggctctccggagccagaacatagagtgagcctgaggctggggtggccagagccaggtgagagggacctcggatgtggaacaaacatgggtgtgaaacaagtcagagaggctgtggcagggcaggcccagctgagaggtgagggagggaggaggtgggagtcaggaggtgggaaggccaagctctctcctcctggcctgctgaagcccctcacccctggccactctccagcgccctaccccccaacccccctcgctccccacccgctgatctctgcagggtccctctgatctccatcctaggccagttctttttcccacttcctgccatgcctggatgagctgttcctttccggcacccccagccaggagtctgtgcatggagcttccaaatgcctagccaccgtgcagatttcctctccgagcccagccccatatatcaaaccccaccctccctctacttgggtgtacctcaggaacctcagcagctcaaactgacctcagcttcatctcccccaaaccagttcttcctactgcatccccatctctgcaacgcgctgtcggccaccctttgacccaagcctgaaacttagtgtgctcttgtatttccccgttttatttattccccagcaaagcctctgaactgtaactccaagatgtccttgacatctgccctctcccctccagttctcctacctctgcccaaggccaggtcaccaggttatctcacttggttaaccaccacagcagccaccggcatgtccccctgggccctaccctgcaggcagtcagaagttgaccaaggcatctggcaaagtgaggcttgttcatacgcagactgtgagggtgtggtgggcctctgggacctggacacagcccaggactgcttgagctcaggatgcgtgggagccatgtccacaggtgaggctgggagtgagtgaaaaaagcttgaatcccaggagcacctgggagaccctaaagggccccagcaggaacgaacctgcagaccacctgcgatttctccaagagtagatctttctttctggttgaagaaagcaacaaaaagaatgaagacccctcatatttctacaacacttgcaaatgttttgcctcattgggaacctcagcacagaagaaattattatctccaatttgaaggtgaggagagggacttgtccaaggccacatctcagtgggactctgtatcctgggacctctacagccctcagggtcacccagacatgaccatcacgggagtgactttctcctgaaacaccaggctagccgccggagtgtgtgctgaacatccagcgagctgtgtgcattcagccacaggggaagcgccgggtggaagaatgctttctgctcattgtgactcacacaagcttggatgagacactctgggaagattctaatttcagatccgggggtggaggctgcagtgtttgttcgcctccgctgtttgcctctctcagcatcaaagccaagttgtctgtaccctgagctgggtgcatctgtctggccaggagtagactgggcaattgggttttaaatagaaagtcaaatccaaatgacaccaatccttagggctaaacttggtaaagggcagaataaaagcatcctccccaggacagagatttgtgaatggaaaccagagttctgcagaggcgagtgtgatccagagctctagcgaggcgagaagtggtttctggatgctgtttgttttccttttctttttttttttttttttttaacttggagagttgagagttaggatatgatgagcttagctgccaggcagactgggacattggcaccaccttttggaggagatgggttggagccctgccagaggaagatgacgtggaccagggaagggaacttggcagcgtcccgcgggccggggaagagtcaccgctggctcctgcagggctcagtcacaggggtgcttctgacaagcaggtccaagcaggagaccagatgggatgcaggtcagggaggcagggaggtgtggactcattttgaagagccagagaagggcatccaggcctcggcttcaggcagacctcctggccaggcagggagggggtgggagggccagctcagcatctcccggtgtctgcccttggtccctctggggcatctttttgcacagtgtcgactctggcccaccctgtgtgagctgtgtctcatctgcagaaatgctcctgatggacagcctctcctccactttggcccagcctgggtgaggggccctctctgctcggggctgccctgactagtacacctctcagacctactcggtgatgtttctgtctgctgtgacccccccgggggggcagaaatcccatggggttcagctcctatcccggggggtccacacctatggactgaatgagtcagtcagtcccctccagaatgggctgaggggccaagagggaagaatgaatgggagtccctcccagccctcccttccctcttcacagggtcggaaatccatcgtgaaagccctggacagagctgccgctgcagacttctggaagccatttcctgtctttgagggtgggagggatctccctagactcttccaagcctgttgcatcaggacccccatgttagccagctgccttctgggcaggtgcaaggataccattggctgcagtatttgtagaggtgacacagacatcaggggagaaaagccgtctgtgtgatcacccacttggcacacaggctccctggcctcacttttcccacctgagaaatggggataatcacacctacctagcaggtatgctgtgaatatgtattaaaataagggactcacctgaccatgtgtctgcccctgaccatttgctggtccccgtaaactgtgcacccgtttctcagaattaggcttcaaataactggccattagtgaaatgaatctgtcaagcatttctctttaccatgttttagaatgtcgtctctaatttcaaaaaaccagcctcctgggcccccagaacccagtgcaggtaccatatgtctcccccagaatagtaagcagtaaaaatacaccatttaaaatagaggctgctgcccaatttggaggaaccactgccagctccgcctggcacgatgctaattgatttgttttctttgctccaataatccttccctgtcagcaccttcctctcccccgtctttcctggctcactctcccaactcggcaccaaaaatagccccggcccagattgctgggccccaggttgtaatcatttcctcgggctttttctcctctcgcctccgtgtcaccacctgcaaagcccagggcctaatggagggtgcggactgccgcagaaagggcctgtgatggagaagcaagccctgtacccagagccccccggctgtgtgtgaataacaccaatgcccattcattgggatcacggtgctgggagaaatggcagcgctgaagacatgagcactgccaggctgagaggctggcagcagaagcagacccaccaagaggaccctagggccaccaggctgttagcctgtgtatgcacaagatgctggagggggcagaggaaggagtggaataactccctatcatagagggcttcctggaaaaggtgccctttgaaatgagtcttgcagaacagggtgctcaacaagcagataacaaggggaagggcatcccatcatcaaaacaggctcacatgtataaatgagaagcatttaggtttgttgaggttgttcagaattttgtactcagaaaatttgaaagaagctattttgatttgatcacacatggattttgtgtcattttgaaaagtgaaggtttagttctgagtcaccagtggcaggagtgggggtgtcttggtcccactgtgcattccacccagagggaacagtacacacacaagtggttgtcaggatgcaaacatcctccgctaactggagacacacaaggagtttgccgtggctgatgccaggagcctgaggggtgggaggtgaagctggacgagaggcggagcagggacccccacctgcttgcctttggggtcatgccgtcctctctgcctgaagccccgtcccccaggtctaccagtcaaatttccattcattcttcagggctcatctgggtgtcatcacctccaggaagccgtcctacctgcctttgtacctgcccaacacctgggtgccattttccctcttctgtgctccagcggagccctgtgtttacctgaatccttgcttggaccatgtggttttgcaatgtgaaagaatgaatgaatgagccttcattcatgtgcaaaactttgagtggtgaagacgcataagtggatgagttttttctatgcgttttgctctccaggctacttaaatgttcgtaaggttgttttcctcccagaggtgaaaagcaaacaaacaattcccttaggagtcgcagactgagatggcattgttcattcactcattcctgcatgcgctccttcatgtgtccgtcaggcgggattaacggccagctccgtgtcctgttttgctcgaggtacaaaaatggcacatgggccagtgaggatggtggacacacagttgcgtcgtaagaacgtttgaaaaactgtatcatggaaaaagtgctttaatgagggggatttgggcttccctggccaaatggcacagacgtgtgggtcaaagttgaatggatgatgaatgaaccaagaagtcctgaggacttccttccttcttcctggttatccagggaatccacgtgcagtgtatgcagaactttgggagggacaggccgggcaccgtggctcatgccttaatcctagcactttgggaggccaaggcggttggatcacctgaggtcaggagtttgagaccagtctggccaacatggtgaaaccccatctctactaaaaatacaaaaattagccaggcatggtggcgggcacctgtaatcccagctactgaggaggctgaggcaaagaatcacttgaacttgggaggcagagtttgcggtaagacgagatcgtgccgctgcactccagcctgaaaacagagcgagactgtgtctcaaaaaaaaaaaaaagaacctagggagggaggaggatgatgagggtgtgtcacagagacacaaagcccagctaaaagggctccctggggccagagctggagctatttgagcaacaaaatatcagaacagtctccaattacaactaaagtataaaataaatatttattagctcatagtgatataaataaatgattgaatgagtaaacaatggaggggaagagacaaacctctcccatgctaatgaattccaaatcatagatgtggctcttccatcttcgaggaggggggtaactcccacacccctcaagcgcgggctgtgcgtggtgacttccttccaagaggacagtgtggaaaggagaagagtgactccaccagggagggtctgacacgcaggatcctggccgggaagggcagtgccatcagtgacaagtctgctgacagctggcactcggtctgatgtacctcactcacccctgcagccttcctcccaagaacccacaaccccatccgatgcccagaaaaacatcagacagacccacgttgagaggcatcctccagcgtgcctggccagccctcagagctcactaggtcatccagcacaaggaaagtccccagactgccccagcctaagatgtactgtggtgtcctggtgggatcctgggacaggaagaggaaatactggtggaagctgaacaaagcgtggcatttggagaacactaaggtgctgatgctggcatcctcctcgtggtgagtgtcccaggctaatgtaaagtgttaataactggggaactgggtgtggtacagacaggaactgggaggctcagctaaaatgccccatcctgcgtgggtgcatcctgcagtgtgtggctgagaacagggctctggagtcaaacactcggctcctgacctcggctctatcctgaccatccgtgtgacctccctgtgcctcactgtctccatctagcaagcaggaactcgctaggctatctctgcaacttttctgtaaatctgaaactattctatcaaagtaaaaaagtaaattccttctagcgccaccacttaagaccaatcactcttacgtcccgccaagctgccttccattcttatttctggccacttcccattgataaaattatacctatttgtccactcatttgtcattaacagaatcataatagactgcttcatcgccgtgtcagcgtggtatgtacagtaagcgtacttccttgtaattttgcaccttgcttttattcatgagcacataagctccccagtcgttagctgttctttgccaacgttattatgtaatcaaagcctcccctaaccagccctcggttcttccttgtttttttcctacggataaaccacaccaagaagcacagctctgagcacacaccttcgtccgcatttcagggacaaaagtcgtccaaggaatcgctctccacggaggccacatctttctccgtcaggcccttggtgtgctggcagagcagggttttgtgctagcggagattaatgaccgtagctgggaagtgcatgaagctttccctggaaagaaagaatctatgggatcaccattcattcacttaaacgcaggcactccttgcagactattgatttttgctccatgagcttaattgtcttctggagatattttggggtctagcaaggccaccatagtcgcctcgtgccattgcccactgccctccccaggaaagctgtgctcatcttcagcagggctggtcctatccagccccacgcgaggcccagcttaaatgccccattctgcgtaggcgcaccctgcagtgtgtggctaagaacagggctctggagtcaaatgcttggctccaaagggagacttcctttgggacttgctttgggtcccctgttaggatgagaaccacgtccggtacagccacaactgctctcctgcctcacccgcatctctgcggcgcccggtgcctgtgtaagccaggactctacaagtttgtcgaatgagggaatgaatgaatgagtgaatgaatgaattaatgaaggaacgaacgaacactgtgtgcttgtaggatcggagcggggggtgcacactcagtctctgggtaacctggttcaaattccatggctgtgcgacctcaggtaagttttgtctgccgccttgtctgccaattgcaaagcaaaatggccccggggccacctgtgagtgtctgggtgtctgtcattccaaatgtagagatgcgatgtcccgaatctgaccaagccaccaaacccagccgggataagggtgtctcctcctaaatggcccactcctttgtgggcccctttgaaaacctaaaccaggccaccccctcccttcctcacgcctccctagagacctcccagcccgaataacacgattcccggttggaggagctattgtgtgtgtttcttggggttgccgttgcaaagacccacaacctggggagctgaaaacagcagcaatgtatcctctctcagtctggaggctgggagtccaaggtgtcggccaggctggttccttctaggggctcagagggacccttcgttctgtgccgctcccagcttcctgagctgccagcaattcatggccgtggtgatgtgcagatgtgtcccctgtctctgcctctgcctgtgtgttgccttctctctgcgtccctacctcccctctccttataaggatgccagtcattgaatttacggtctaccctaaatccagatggcttcatcctgagatgcttagccacgtctccaatgaccctatttccaagtaagatcacagtcgcgagtactggggatagggatgttgacgaatctttttggggtcactaaacaacccactgtgctgctgtccgaggccttgcagacccaacacctggctgctgctccagccccatatctgcctcctgctcagtcccctacatcagcacctcgggcctgccctgagttccctggggacccccggctcagcgttctcctctgctgaaggtagtgggccccaccccgtcactctctccccgtccgtccctggtcctgctttggagcagttgtccctgaaacagaattttagacagggtctttgagcgctcacctgtcttggctctctggaatggattcacgttcatggcagaggctgtgaaccctgagtttacggtggagcctcagtgcccagaacagtgcccagaacagtgccccgcactccatgaatgaatgaatgaatggctatgattagcactgagccagctgggtttgggaggaagctgccatttctgcagcaccccctccctggtgtgtgggggggcccagcccaggcactcatgaatgaatgaatgagtgaatgaatgaatgcatgcatgcatgaatggatggctacagttaggctgagccggctgagttgggggtgaacctgccatttctgggcacccctccctggtgtaaggagaagcctgacccaggcactccatgaatgaataaatgaatcagtgaatggctatgatttgcattgagccggctgggttgagagtggacccaccatttctgggcacccctccctggtgtgtggagaaacttggcccaggcaccccatgaatgaacagacgaatgagtgaatagctaagattcacactgagccggtcaggttggggctggacctgccatttctggacatctcctcactggtgtgcaggggcgagggtctggcccagacactccatgaatggatggctatagttaggctgagctggccgggctgggggcgggcccgccatttctgggcactcctccctggtatcaggaggtgaaggggagaggcacacccggcccaggcctcacaaccccctttctggtgtgagggagagaggcgcacctggcccaggcctcacaacacctttctggtgtcgggggagaggggcacctggcccaggcctcacaacccgctttgtgtttcaggtcatccttgtcagctcctcactcagtgaccgggaccagagcctattcctcagcgcagacgaaggcgccacctttcagaagcagcccattcccttcttcgtggaaactctgattttccaccctaaggaggaggacaaggtcctcgcctacacaaaggagagcaaggtaagatatatgggtgccagtcgcctggtctgtggggctggggtctgctcgacccacctggaggtgagtgcccacttggagcaagtgggacccggaacccctgggctggctgaggaggagcctcccggggctgggggccgggatgctggaccccgtcatcgccctctccttggtgccccctcaagggaccgtgcccacttggctgtgctgtgggagctgagcgaggtggtggtgggcagtgcaccaggctcagaggctcaagagaggaaccagtgagtagcaggcgattaggatcatgccactcgccatccctttctgcacaccagtcacaagggcctttctccacttccagaacattgcgcacaccctcatcagacctcactaggcctttccctcagtgtggaatgttcttctcccctcgccaagagcggtggcttgttcttccccagatcagcatctcctcctctgggagctgtgtccatggggttcagcagggaactgaggctttgtcccccggtgagtgggggagcggggggccagcctggtgaggagcattgggctgcatctgcagggaggggcccacctgggttctgaggctgtggagggagagggcctgggggctggggagggcccagtaggaaaggactttgttccttttctgcagccgtgggaacaaatggccacaggctctagcttaagcaacagaaacttattctgtcacaattctggaggcccacagtccaaaaccagcgaagatcaaagtgtcagtggagctgcacttccccctgggctctagggaggagtccaaccctgcctctctcagctgctggcagctgccagtatctcctggctgtggccacatctctgcaccttcaggcttcaaatctcctctgccccatctccatgctgcctactgcataagtgtgtgtgtgtatgcacacttgtaagtgtgtgagtgcatgtgtgtgggtgtgtcagtgtgaatgggtgtgaatgtgtgtgggggtgggtgtgaatgtgtgggtttgtgggatgtgggggggtgttagtgtgaatgtgtgtgactgtgggtgcatgtgaatgtgtgtgggaatgcgagtgtgggtgtgagtgtatatgtgcgtgtgaatgtgtgggtgtgtgggagtgtgtatatgaatgtgagtgtgtgcaaatgtgtgtgagtgtgagggtgtgggtgtctgtgtgtgaatgtgtgttcacctgtgagtgggtgtgggtgtgagactgtgaatgtatgagtgtatgtgggtgtgaacgtgtgtgtgtgtgggtatgtatgggtgaggttgtgtttgagtgtgagggtgtgttttagtgtgtaaatgtgtgggtgtgagggtgtgtgtgattgcgtgtatgagtgcatgggtgtgcacgtgaaagtgtgtttgtgggtgtgtgtgtgtttgtgagaatatgtctgtgtttgtgagaatgagtgtgggtgtgaatctgagtgtagatgtgagcacgtgtgcgagtgtgaaagtgcatgtctgtgggagtgtgtacgtgagtgtgcatgtgtgagagtgtgagtgtgtgtgtttatgagtgtgaaacagcatgtcagtgtgtgcttgtaggtgtgtgtaagaagctatgttagcgagtgtgagtgtacatgagtgtgtggtgtgtatgggcatgtgtgggtgagtgtgagagcctatgtgagtgtgagtgtgtacatgtatgggtgtgtatgagcgtgtgtgtgtgagaacctatgtgagtgtgtatgtatgtgagcatgtgtgggtgtgtgtgagcatgtgagtctacatgagtgtgtgggtgtgtatgagcatgtgtgggtgtgtgagagtgtgagagcctatgtgagcatgtgtgaatgtacatgagtgtgtgggtgtgtgagtgtgtgtgggtgagtgtgtgtgatcgtgtgtgtgagtctacatgagtgtgtgggtgtgtatgagcgtgtgtgtgtgtgtgagagagagcctatgtgagcgtatgtgagagtgtgtgagtgtatgtggacgtgcgtgggtgtgtgtagatctccctctgcgcctgctttctgtaaggactcgggccttcgtttagggcccacacagatagcctggggtgatcttcacatctggagacctcagcaatcccaactgcaggctccctttctgccctgtgaggtgatggtcccaggttctaaggattaggacatagatacattttgggggccactctgaacctagaacctctgcccaacaggaggtgtgggctccacagttgcaggaagggtcccagtaggaggcctggctctgggtagagcaactgagccaaactgtggctggtcagggaacgagaggaatagcacatgcctctttctctctccaatgcactgaggcttcccacagatggaatccaatcagaggctagaggaaagaggctgtggaactgtctacacaggtcagtctcagggccagagaagggtggatctgtctacgtaggtcagctcccagggtcagagaagggttggaaagaggcagcatggacctggaaggcaaacacaagctgcccaaatcagcagccttccctgtgccaccgcaggccagcttgggccccagtatttcacactcttccatattcctgtgcctctctttctcaacactgatcacaatgggtatctattagcccattgtcacactgctattaagaactacctgagactgattaatttatgaagaaagaggtttaattgactcaaagttccacatgggtggggaggcctcaggaaacttacagtcatggtggaaggtgaaggggaagcaggcatcatcttcacaaggcatcaggagagagagcacaagttgggaaatgcaaaatacttttaaaccatcagatctcatgagaactcactcattatcacacaagaacagcatgggggaaactgccccatgatccaatcacttcccaccaggttcctccctccacatgtggggattacaatttgagatgagatttgggtgggaacacagagccaaaccatgtcaggtaactctatctttgtgaagtcatttgattattgtctacacccaatacatgcaattggggtaagctctttgagggcagggaaagtgtctggtctttttcaccattttaatctaaagtgcccggctgaaaatattagttggatggacagatcgaggttgggtgggtgggtggatgggtgaggagggatggacagatgaataaatggatgaatagatgtatagatgatggatggatggataaatggatggatggatggatggatggatggatggatggatgggtgggtggatggatggatgggtggatggggatgaatggatggatgggtgggtgggtggatggatggggatggatggatgggtggttggatggatgtgtggacagatggatggatagatgatggatggatgaatggatggatggtagatggatgggtggatggtggatggatgaatgggtagatggatggatgggtggatggagatgaatggatggatgggtgggtggtggatggatggggatggttggttagatgaatgaatgataaatttctaccaacagggacagtccaggtcagggacctccaaatggagattcctggctgtcctttgccatggctctcgacaggacctggcctccttgccaaggttgggtcctccctgactggcgtccctgcatttctcagcctcctgggctacctctttgctcctggccccttccttggggatggcttgtgcttctgggtattaatagcactacttagccttccatgtaattagactaaagcacaatcacggagacttattttcccgcagaaattgactgcattgcaattgctctctaatttatggtgccctgaaaaattaatggagctgaaatctcagttatttgctttggttcttttctgtgactataaggggagaaaaaggcttagttgcagttgtaaaaggaatgaggaatgtgaggaaattaataacaatgacaagagggctttagtttttgaggaggctatgcagtttttcaaagctaattctcaagaagcagggtggtgtggtggaacaacgtcagctttgactccaacaaatctggtgtattaggcaggtatctgcaacaatcatactgagtaacacacagctccaagcctcaatggcttacagaaacaagcattatttcttcttcctggggctctgtgggtgcccagaggctctgctgggctttgctgcgattggctatatgaggctcctggttactggtggagtttgcgtccccatacgactcttatgctgagagcacactattctcatgatgagggggcagaggctccaggggttgcaaaccacacaagcagctttagcataacagctttgacctggaaaacatcacatctactcacacagcatcggccaaagcaagtcacatgacaagcccagagtcaatggagtggacacaattgccctgctctaaggatttgcagatttgtgcaaagccaaaggcttgcctccctttccttccctacctcttccttcccatacgcccgccctgcctccagcaaacacctatccacctaccctcagactgccctgttccatgactttacaatgcttcccttatcctcgttataatttgggtcactgtgagtctgccttacttggatcctggacagccttcctgggtgacagcataatatgcatttcttccaaggctcagccgactgcagtaggctcttgggattggtaggaagtgagagcccagcagtcccttcccacgccagcttcctgggggctgctgacatgaaactgaccagcctgtttcctctgtgcctggtcttcagacctgcttgctgaggcagaaccctgggcacttacttctaaaagcataaactcacttttatattttattgaattttattccccatcaagcacttcttctgcttcccagcatggtgagaaattgatctgagcccaggattgccttttagaaacttagtagggcagagaagacacctttgggtgggcaatcagggaagacttcctggaggaggaatgttcgaacaggggcttaaagaatggatcagaatgtatctttaatttgtaatacatcttcagggcaataaagatgatcacatatgacaagaaaaagaaaaaccctcacagtcccccagccttaagtaaagcagtgtttgcattgatccatattaaagaaatagtagaaattgctggcagtgggtgtgaggagagccctaatattgagtgaacagaggtgcagccttcgcgttggctgctgtgaatatcagcaggttcatgaactgcccagcagagctacaagcttcgataccacgttgatggctcgctctgacctcagacttgagaacagggaaaagattgggcatctcttgagtaacagaacaattctcttagcaatgagaagccctcactcagcatgtgttcattttgctctaagaattttcatctgctggggctcagggcaggaacaatactcccctctggatatgtaagcagaaaagggatttaacaggagggatcagtgctttctaaattgttgggagataagggagagggttttacactagaccccccttcccaggatgcctcctgaaagcctgcagtgtagacccaccaggaagtttctacctctgcccatcaggaaggtggggaccagaacctcccagacttatcaagctcaaaaacatgtggctggtgcagctgatgttgccattgctgcagcctgcacctggtaacttccataaagccagtgactggacaccggaatgtggagtccagctgctgccttcaccaccaccacgtctccaccctccagaggtggagggtggacacagcaccatgtcctgtgaccttgctggcagcagacatggcccagtggggcaggaaaaagtctctgcctcactttcatcttccaaaattggcacgagtgcatccacctgacctggaaatctagctgcaagggagtccaagtgatgctgggctgcagctttcaggcctctgcagtgaaacgaggcaccctggagtgagggatgaaagcatgttgagtgccaccaatcacatccaactgccactaagagtccagggcagactcgaagcacctccagaaaccatagaagacactggcacactcttctatgtgcccttcctgggccctcaagctgctcctttccctccctcctgtcttgcttcactctgactttttatcttcatatgagagtgggaggcgtgtcctcactcaccacctccactgctttctgagatgttgagtgatgaaattcacccttccacaggatgcacccatgcaggtttcagctgcagtaactgggctgtcccggatgtgtttattcttgtttatttgctggtgtttgtcttttattaagcagaaatgttctatttctgcagcaattgatggtggatagtaaaagcgcctcccaggagagtgagttggaaaggcttcataaagctccagggcaggcgtcgtaaacgcaagcgcatgaggcagtgatgccaatggtaacgccatccattaatgtggaggctttattaccttgctcacaggaacccacggtgacgactcgctttttaggcatctattgactgtgggtatgagcagtgccctcctgatatggtaaactgagacatgagatagaagggtgcctggcctgagtcactcggatgacccagagaaagggctagaggtgaccaaccatccttcttgaaggcaagggtgactcctcagcccctggtacagtcctgtgagctcaagtctgtgagatgggaattgctgacataagggagtgctgtgtgaccttgagtaacttacctaacctctctgagcttcagttctttcatttgtcaagagggaaaattgccagcttatgggtgtgtttgtgagtatgtatatgcatgtatgtgtgtacatgtgtgtgtgagtgtgtgtgggtgtgtgagtgtgaagtgaggtggcattcaacaagcacagctcagtgcctggctccgtaaaaggccacagctgctgccaggctctctcacactgtctgtcaggcccagacagaaaaagaagtacaaccaatggctggagctgcaggtatttgttgaacacatactgcatgccaggcactgctccacaagcttattaaaagctccttgccctcatgaagcttatgttctaggggatgaaaactttctttaaaaagtcctttctgaatatgaaaggtgatggcttcttaccatagctgtgtgccagtgaagctccgtttacaaacccaggtgacagcccatggcttgctgacacctgctccagggtgtatggtacaccatctctgtgcaccactatccctggctgccttcctgctcccaaggccgtggtgagtggttgctacagagaccacacagcccacccggctgaaaatatttactacctggccctttacagaatgcacttaccagcccctgccctagagtcaaacgtgttcattcggtcagcaaatgggccttgcgcacccggcagccacggattccgggctaccgctggtgccgcaggtgagcgaggcaggtgtgtgcccccgggctgtgagcggcttagccgaggagcaggagataaactcccaggacgcaaggaagtcagcaaacagctgtgcaggcgtgagctccgcacagcgcacacggggccggcaggctggggacagtgccgccaagatgcaggcagctgagccggggctgggctgggaggacttcaggggtgggggtggaaggtacgcatccgtatggctggattgtgtcccccaaaattcctatgttgaaattctaacccctggtacaaaagaatgtgaccatattcacagatagggcccttaaatgatcattagactattagggtgggctccaatcccatttgactggtgtccttataagaagaggagatcaggacacagacagaggcgggagtggtggtgcacactgatactcccaggcaggaggatcgattgagcccaggagtttcagggctgcagagagctatgattgcaccactgcattccagcctgggtgatggagcaagactctgtttcaaaaaatcaaactacaaaaaaaagacaggcacagagggaagaccacataaagacgagggagaaggcggcgtttgcaagccgaggagggagaaaccaaccctgccgataccttgatcttggacttctggcctcagaacggtgtgagaatctgtttctgtggtttaagctgagccctctggggtacgttgttacggaagcccacgtcagctaatacagcttcctgtgtgaacagaacatcctggacaaaaacccaggggcgggaggcacatgcgcgttttgggatcagggtgcatcctgttggtggagtgtgacttatgctacaccagagggggtttggtgggaacagggcccagggcaaccactcagggcctcgtctgtcaggccgggagacccggactcttacctgtggagatgtggagctgggaatgacgctgtcccgaaaaacaggaggtagccaggggacgagagggaagtagggatgctccaggcagaggacacagcttgcgcaaaggcctggaggtgagagagcaaaatgacccccattccagatgattgagcttggggaaccgtgggagtggggttagccagggtttagatgggctgagcaagacagactctcaacctccttctttaagacaatttagcaatcgtgggtgctttctccatgcatgtggcagcaaaggagggtggcttaacaacgtgaactcccaggattgctgaagagaaagagatgatttcactcatggtaccaggagcgcaaagtattaccagacagccacactcacagctgcctttctcaccgctcactgtcagcgtcacgggtggagccttcatccctgaagacaccgtggaggcgggacacctttgccaggacagttccatgatgcagggccctgtctgcttttcttcagctgaggggaagagagaagggacgtttgctgcaattgcccttgtgacagtggtggggtctgtagttttcaaggcgagttcaggaattcatccactttggtaagggaataaaggctgtgtgaggaagatccagttctgatatggacgaggagggcaggggggtcgccagccacccaggatttgctacgtttcacacctgcagtctcctggccgtggttccttgggcaacatcctggccagtcttgcagtgggctcagccctcggctggttcttctgatctgctcatcctcagggaacctgccatgggaagcctgcatgagagctccgggtgtgttcatctcgactctgaagcgtgaaccgtggtaaagctttgctgctgcaggaccggctaattggcagcttgagcatctgagcttcactgcggtagcttgcatagtgtctcatcgctgaagtttccgagatgggagactaggggaggcaggagcagccgaggtggagtggggaagtggggtggcctgagatggaatggggtgccggcccctgagggctctgcttacggtggggcaggtggggtggcgggcacctctgggattgtggttgcaggacctggtggatggtgggaaggagggaggccatttactgagaccgcagaggaggaggaggaggaggaggaggaagacacggaggctggaggagcagggctggttgagaaaggagccagcttctgctgggccctgctaagttgggggtggtgcagggaggaagtgaccgtggagagggtgtcaaggagtcaggggtcatcagggcagaaatggggactgagtcacttcctggcaggagaggatcctggaagggggatgtgtggcatgagcctcagagtaggcctgatgtcacccccaggcagcagcgaccttgggactcagcccccgccttcctctgcctgggagtatttatagagggccttctaggtttcaggagctggggcaactgctgggaacaaaacagaccaacccctgccctcgtggggcctcctttctagatgaggatgggggcgcagagcagatgacgagggatgggttagaagctgctgggtctactgagggcgggcggggagtgagggggctgccaagcggcttggcctctgcatggttggagagctcagaatgtgagcttggacctgccatggtggaggaagagaggctagaaaccagggacaggcaccagggcggccccggggagcaatgggagtggactgagtgccgtggtagaggaagagaggctagaaaccagggacaggtgccagggcaggcctagggagcaatgggagtggactgagtgacacaggatgtcctggatctgaggagctagaggccagagaaccagagttctgagcgtagcatgaggggacacgcctggggatccctcccccgagcccagctggcactggcaccaggacatgagggtgtggcggacgaaggcactgcagccccgtcctctctggcacctgggccctgagcacagactctgacttcacagacagggctctaaccctggctttgcaatagcaggggcagggcctctgagccagcggccttagcaaaggcctgacccgggggagactttaaagtgagtcttgaacaccggctggggatgaggaagggcattccaggcagggggcacagcacgcgcagatgctcagaggaccctgtgcacatattagtgccacatgtgtgagtgagccctgagccgagcgtgcctggggtgggggcatgcagggagtgagcaggatggcagccagaggggggtccaatggtatcgggggggctgtgtacccatgtgagggtgtgggcttttttggaggccacacctctcctggaaggtctgcgtggagagtggcaggaccaggtgtgctctgcagctgcaggaccgagggctgagagcaggggtccacggagatggtgtggcccagctgggccatggccctgggtggagaggggtgcagtgtgcagctggtgcagggtacacagttgcatctgaagcgtggtgacttattagacatggcagcaggaaggtgaggacaggaacccagggaggaaaaggccctgggcactgggcttggaggctgggtcaggagcagagggtgattaggcccaggcgggcttccaggaggagggggcacacctgcctgtgctgagaggcagggctgcacagggttgggcttgatgacctgtttcccttctgagattctgcacatccttctttggtgaacagcagtggtggcagcggtgtctgcaacagcagtgacatccatgatgtcgttggttcgtcataaggtggtgcccgtgacaaggacacgtgggaacagaaaagaagcacgcggcacagaagaagtcagttgtggcggccctcagagccagcagatgtggcctctgatcctggcggctattagtgtgaatgatgtgcccgttatgcagatgaagaatttgggttgagtggtcggcttgagccttccttccttcctgggccagtgacggaaattgctgtggtcaaatgattcattctagacagatgctgatcacagaagaaataaagagaagtgcattcaaaccacagataattcaagtgcaggtctgacagggggtgaccctgggtgaatcactcaattgctgcgagcctccatcttccgtctgcacgaggtattgttagaagcatctacttcctggcgatgttgtgggggcaccttgagaggcaaagggcccggctggtgctcgcacctggagcggatcctgctattacgggtgttatcaggcggtgatcgcgacagaacgtgctgtgtgcgtggcaagtgcaaccactttgcagcgtgcctggataatccccaacatccctcaaagcgggaggccagattcccattttaagaagtggtgaaactgaggctcagaacagcgttggagcgcacgcaaggtctcctgctgtgcacggtgggcgctagtggagccaggcctgccggagcccaagaaccctagactcacagacgctcccctttgaaacactacagctggggcatcattttatagatggggaaactgaggcaagaaactgactcagaggccatgacagggaggcagacgccagctccgcagacccgggtccccgcctccctctccagccctctctccccgccccgcccagcccagcccagcccagcccagcccagcccagcccagcccagcccagcctgcctcctccatcagctgcacctgtgaggcggcgccagcgacctctcctggcccaggcctgaatctgcaacaaaacacggtgagctctgagctttgcttctataacaaggacttcagcatatgatgcttctggggtgcaaaggatcccctaaacaccacatagtccatcctcccttgagaaatgcagtgcggaccgtattgcaccaatacagcccctacccccagaggggcagctggcaaaaacataacgcaaatcaaagatgaactggggacatcagttatagaatcactggcccagccccgatgtctgtgttcactcatcacctaggagttagggatgaaacatattgaaatgcaaatgaacaccgagccagagtcagaggagaggcaagggaaaagggacagagtctcctgttgtccaggatggggaaaggcaaacgcgtgttgtggataggctgcgtgtcagacacgggctagacttccaaagcacatgatcgggttgaatcatcccgaccttctgagtgaggatgaggattgtcagcccagttttatggctggggaaaactgaggcctgccccggtagctggttccaggtgaggatgggagcccaggcttcctggcattgctgttaagagattggcctggccactctggagagagaagaggaggacagactgcctccacaaggcccctctgctatcccgttaatctcctctggagtggacagaggcttttcccagttgctgtgccagacccctgttgactccagaagggatggcaccgtgcccaagaggccacagaagagacctagaaacagcgaatgagacacagggtttattggaggaagttacatgcagggacagtctgctggcagtgggctggacaggggagccgctccagtttgtaagaagcctgcagtttatgtagctttttccctccgcaccctccccctagcaacctcctcccaacccagaacagagggccttgacccccgcagggcctgcattccaagggatgggccagggcctgttcctcatgggtaagaggtgaatctctgggttggccactcctggattccttagccggggactcggaaggcacattcttcttaggccatggaaacattctctgggtgtgctttggtgaccttcatcggtttaggggctgcttcagggaagaaagggaagggagcggagaataggcttcctgcttctgctgttttctcggtttccaagatgccacatttgcggtagcgttgccagcacccataaccagtttctcatatggagaatggcactatgaagtcccaccccctggcatggtggggcttggtgtggccaagaggagagctctgatagagatgccttccccacccgacacgctgctgtgcccaagagctggcttccctcctgccagaggagatctcggctccctccaggactgtctcttccatgaaggagggggaggccctttcccacgggccactgtggaaaggggagcggctctgggccttgcccgtggccctggcaacttcacctggcatttccaaaactcatagcttgatcaaggtcctgtctctacctgagatctccaggccagagcactgggtgtgaacctgaggatcagctggccccttcccttctccccaggcctggggcactgacccaaggagcccctggctccattcattcctcccagacctggggcactgacccgtgggcccccgaccccgcccactcctcccaggtctaggagtgggctccctgagtatccctggccccattcactcctcccaggttccggggcacagatccaagaaccctctcaccctctttgctctgcttacccctcagaggacctgtccagctgcctgcacaggcctctctcaggccctgtcctcctctccattctgctgctgcccccagctgggcccaggcctggcctcctcagggctccctgcctccacccacagcctctggtgtgggctacttgaaacgctgtctgaccacggaccccctgagcgcctcatcttatccggccttggttggtggttttgggcagggccagctgtgtgatttgcagggtgcagtgcaaagtgaaaaatgttgacaatcaggtcaaatgcttttcctttcttctgcgctctctctctgggcctgtcaccatgttctttatgagccatttaacattgtgctccctggcccacagggacaccctcccaggcccccaggaccagcctcaagacagtgctctgggcgcccacccctgccccttcctgggcccaggcctgaccctggcactcaccagggacaaggacagtggtggtcactgtgtggagacaggaccacaggcacaggcagctgagaacccctcccgagggcacagggctggagagggagcctgggcaatcagcccaacccatgctctcttgccccctcagccttcacttccaaagctccaactaaagacacaattttttttttcaggtggagttttgctcttgttgctagggctggagtgcagtggtgtgatcttggctcactgcaacctccgcctcctgggttcaagtgattctcctgactcagcctcccgagtagctgggattacaggcatgcgccaccatgcccagctaattttgtatttttagtagaggcggggtttctccatgttggtcaggctggtctcgaactcccaacctcatgtgatccgcccgcctcgacctcccaaggtgctgggattacaggcgtgagccaccgcacctggccctaaagacacaattattaagaagttcaagttggcagctgcagagaattaagccccagatgtggggcccttctgagctaggtccctgggcgatggcactggtcatacgctgtgaggctggccctggtgtcaggccccagcccacctgcgcctgcactgacccctgcggtagatgccacacccctgctcgaggccactgctgtgtcctgctctgccatccgttcactgctccagccctggcaacacgtggctccttcctcccaaacgcccttcctcccatcctcacacaggattataaagtccctcccacctttgaggctcagacacacctcctctgtgagacccctctggatttcaccctggagaacctcatctcctggctcctgccagctggcccggggacaggaatggttcctcctggaggcggtggggtttggtctgcatcccagcatgagcacagcgcctccgcgtgtccgctggacaaggatgacttctcctgggggatctgctgtggtgaagacatcaccctctctcagaagcagcttattcctgacgtcctgaccaagcttttgtttcttttttctgccctaaagctctacgtgtcatctgacttggggaaaaagtggacacttctgcaagagcgagtgaccaaagaccacgtgttctggtgagagcacttccccaccccaaacccatggggcccgcagctctggtgagagcacttcccccaaacccttgggagcccatccctgcagctccctttcctcctctggaccctccccatcccggggctgggtccccaccgtccactgcctctgcctgcagccccacaccctcctcatcccaggggaacccgcagtcgttcttcctgctccgcattgggtggtatcagaaatcgtagagtccaggggttggtgtccctcaggccacgtttttacccatgaaccagctatgtggccctgtgccactgctgttccctccccgagcctcacagcatccccagtggagagaggtgctgatgtacacatgtccccagcgcagcacccggcccaccactccgcactccctgcccgaccccaggccctgactcagcccctgactgacagaccccgtgggtgccgacccggcctgcctcagccctgctctcctgcttatccacacctgggccccccttccactgctcagcctgtcacccttcccagcccctactgggtgccaatgagcaggataagtttggggttgtaccccagacaagcccccaccctggcctcctgaggagccagacccgagaaaggaggctcctgtcccaggcagagggccactgggggcccctgtgttccgatggtgggtaccagccactcgagtgcatcctcaggggagcctctcagtgtgccccctgagcaccccagcctcactgcacggggggcactcggctttccttgagaaatgtctgtgggatgcatctatgagggctgtggaggatgagggcttgcccagggtcttaggcagcagcatggggccaggagccagtgcagccgttcagaactcaggcctgcctctctcctgctggggccatatcccgtccttctggtcacactgcctttcatgttacaccgctccttgatgtgctgattccatggcattcctctttcttgtgcgtgtacacacacacacacacacacacacagtgctagcctttctctttcttatcccacgtgtggaacagaccattgcacgggcctcctgcgcaggccacagcctggtctccgcaacagaaaaacacacggaaagggcttcctacccgtcccgagggctcagggctggaaggggagcccgggctatcagccctacacacactctcttgccccctcagccttccgttccaaagctccaattaaaaacaatattattaagaggttcaagttggcggctgcagagtgggcaagggcccttcgtaatgtcacgctgaccgtggcaggagactggcgtcctggccaccccacaggctgaaggaagcctttttcctctggaatgccgatggctggtgtacacgccgttggctcatggggagaggcgacggccgtctgtctgcggattgcccacgggagggcccggttcctccctcggaaaccagagcacagccatccatcactggccttgtcattgctgtcaactgtcagcagccagagctgccctgcctgggcctgagcgctcgcagaggtggggagcagagccaggaggtgcgatttctgagccaggtcgctctgggggattggtagagctctgttcactcccgggccaggccgggctcatggacagctctccagccagagaaagaaaccgacccacagcgcccagagggaaattggcgataattcaaacgtgttattatctcaggcaaatcaaattgtttcctcccccaagtttccctgctgttactcgagggaatcacagcagacactgaccaccacggccccggccctgggatctctcctggagcgtggtgacagcggtggggatatctcccctccccttgtaagcggtgaataatgctgttttgacagcatttccaaggagctctttgtccttgaactgacagcgggaattgccaaagccccgtgttctgtctgaagctcagactcattaacgttttgtgaagctacacagcaagcaagctcattagagtggcctgcaagcgagagggagcagccccaggtgccctgatacctgctgcctcctgggcagggccgcgggtacccgccccccaccctgccctcagtgtctccacgccccagaacagaatcataacagcagctgccccgcagccatcctgctttgaatactgagtgtccgctgggcagcacgtggaggctctgagtgcaccattccacggcatccccacagcagcccatgcgggtctccctcatgtcacagggaagaactgaggctcgggcacgcattctaggtctcatgtcacaggagggaactgaggcttggataggctcgggcccacattctaagtcctgctgcccccaagctgtggccctgagactcggtccacctctggctgtggccagggcccttgcccactctgctgggtggtctggccgcttgggcttcaccgggtgttcctgcatctgcctccttgctcagccccacgctcacccagggaaagcctcagccttcctctccattcgctccaggcctggccctggtgcagggcatgggggtggcagggcctctgtccatagaaggaagaggtggaggtctccccactacagccttgatgatcacacctttctgggcttaacagaaccatttgcactggagctgccctcagcacaaatggggtgaaagtcagttcccacctccccaaaacactcactccctgagggccgcctgcccccggccagctcactggcctgccatttctaagcagtggagacctcaacaagcaagaagtcctgtgtgtcaggcttgccatttcctgcggggagtggggctttatctgagttgttagaaatacggtctaacagagtcttcaaaacctatgactgaggggcctggagcaggcaccaggcctcaggccacctgtacaccggtgtctagcccagggccttcgccagtacactgagaaatggctgtgggaagtgctcagagcaagagactaaaggaacaaacgtggtaaataaatgaatttatagggtgagtgactcaggaaatgaatgagtaaatggctcagtgagtgatgagttaggtaatgaatgaatgagtgaataaatgagtgaatgagtaggtgagtgagtgaatgagtgaatgagtaacaactgagtgagtaaatggatgagtaaataactgagtgtgtgattgagtgagggaatgaacgagtgaatgactgagtggtgagttaggtaataaatgagtgaataaatgagtaggtgagtcaatgaatgaatgagtaaatgaatgagtaaatagctgagtgtgattgagtgaaagaatgaatgagtgaatgaatgagtgagcaagtaactgactgaatgaatgaatgagcgggtgagtgagtgggtgagtgagtcactgaatgagttagtgagtgagtgaatgagtgactgagtgaatgagtaattagtgaatgagtgactgagtctgtgattgagtgaatgagtgagtagctgagtgagtgagtctgtgactgtgagtgaatgagtgagtgagtggctgagtgagtgagtctgtgactgggtgagtgaatgagtgagtgagtgaatgagtgagtgggtgagtctgtgactgagtgagtgagtgaatgagtaagtgaatgagtgagtgagtcactgagtgaatgagtgagtgagtgaatgagtgagtctatggttgagtgagtgaataagtgaccgagtgagtggacgagtgattagtgaatgagtgactgagtgagtctgtgattgagtgaatgaggggctgagtggctgagtgagcgagtctgtgactgagtgagtgaatgagtgagtctgattgagcaaatgagtgactgagtgagtgaatgaatgagcgagtgggtaagtgagtgagtcggtgattgagtgactgagtgagtgactgagtgagtgactgagtgggtgagtgagtgagtctgtgattgactgagtggttaaatgaataagtgagtctgtgactgagtaagtgaatgagtgactgagagaatgagtgagtgagtgaatgagtctgtgattgagcaagtgaatgagtgagtgggtgagtgagtgagtctgtgactgggtgagtgggtgaatgaatgagtgagggcagagggagcctgtgccccaggtgtcattgcccctcttcacagatgatggatgatgaggctaaaattctgtattgctggtggagggcctgctgctgaagggaacaatgcctgtctgtattcaggagagagcaatgtcaggcctgagacctcctttccaaggagcttacaaatggtctattcacaaaagccgaaatcaacactccaccttgaaagggagagctctttaactagggtcaaaatgattgatgctggtgcccctgtgtttgaaatctcaatagactacaggggagtcccagctggctcctgccacatggcacatatgtggggtctgtgccactcaaacccatttatggatttcccctgtccacctggggccacttgggtagacctggtccctggagaaggtgaggcaaatggggatcctggtgccaggcaggttgggaggaaggttgggaaccgaacggggccaagtctggatgggaaactgtcagtggtggggagaggccatgggggactgggcactgtgcctgagacatctcaaccacttgcaagcaggctatgtgggtgctcctgcccccaacgctgagtggccactgataccaggaagtgacttcctcatcttgaggctcagtttgctcttgggcagtgtccatgagagggactggtgtggtaaatggataagcggctttaacagtcatattagttggaatgtgtgtgataacaaacatgaccagccaccaaatccaggagttcccagggagtcttgctttgcagaaggctaaagcaggtggaagttttcagtgtgaagaaagtggcaggtagatgacagttcagtgggcacatggagatggtgaaatctgggagatgggatgcggtgcttggtttgagaaaccctggaccaggtcctcactaaggttcctttcatcaaaaaaaaaaaagaaaaaaaaaaaatccgtactcccctcctgggagccaggcccaacactgggcatatattgaatatgacaccaaaattggactccatccctgccttccctggaggaccagcgtatgaagccgtgaccctaggacatgtcttctgtcccgtctcaggcctcattccaggtgcttcataggcttggcccctcacagaacccctgtgagccaggtggtgaatggatgggtggatgtccctcaaaggcgaggctttcagacttgccaaccctgagcagcagcctttgccctgtcattgctgcctctgcagcactgagaggacgagtactgcataaattcaaggcagaattggtgccagagtacttactggaaaagccaggagagagtgtccaagagggcaagcgaggctttccacctccagccagccccatgcaggtgggcagtctgtgagagcacagggaagagccttggacaaaggggccagggcacatgtagactccagctgagaccctggactgagggtggggcagctgtacttctcccccccaccactgtcccttcactgtattatttggtacgcaatgctgtgcatagctaggaaacaacctgtgtgatgaaaagatgttgctttggaaatgacagaacctgggtagtggatcttgctctactagctttatgagctttgatctgttttcacctgtctgggccttggtttcctcgtctgtaaaatgggtataatcaaaccattcgggatcattcaagataagtatgataaggcaactagagcacctaggacgttccctgtacctgagcacctgccaccaaatggaggtattaaatgagttcaagtgacatgctgtgtgcagcacagactcaggacctggcttttgcctctcaagacagaagcttcctccctctcctcctgcccagttaaagacttcgcccagcagggcaatgaaacggggaggggagtcagacagggatgaggtgtgggtggattgagggtggagtgggagaaccacagcccccgcctgagtgtcctgacccaggagcccacagggcagctacagtgtctcctttatctctgtccccaaggcccgcagcgggccttggacaccgtaggtttgtcccactgggctcttagagatatctatggaactcagccacttggcaaaactcctgcatttccttcacggcttctctgaagctgggaccacccccaaaggaggcagagtcccataacagatgggacatctagactcgtggtattaggagaaggccttggttgtgagcagggcagtgtgtgcggtctgaggagagcatgcattttgggatccagcagacctgggcaggagcctgagactgccctggtctgagccatgttgcctcaggcaagtcacagacccgttctgtccctagtggggtcacctatgaatgcagatgaaggcacctacctcacaatgtacagtccaggcccatgtgtggggacagcctggtgcaaactgtcgagtgatggggtagggggtgcattcctcttgctggagccttcgccacctcacgaaaggattcaggcaaatccctggaggcagcaccagggggagggctgatggctgagagagcaatcttcccaaggccacacttgaccaggtcatggggagcaggagacggagcaacagctcaggtgagcctggcttgaatcacaggtcagcccttagcactgtatggctctgggagagtcattttgcttctctgagccacagtttccatatttataaaactaggataggatgggagtcccaggcctgcctgcctcctgtagtcattttagatgatcaaaataaaacaaaacaaacaaaaatgaaaaagcaacgtgaaagtcttttatgaagaagaaagtcttttacaaacactcccatggcaggaagaaacccaaccccctcagctcacgtaaggaagatgcagagactccaaccccctcagctcactcaaggaaaacgcagagactccaaccccctcagctcactcaaggaaaacgcagagactccaagcacctcaggagcaggtggggtcctggggtggtgatgccctccggacccacagagcaagggcggcttcagaaccagggaggccacgtggctgcagggagtgtggggagcagctgggggacgggcatggtgactccattcccgaccccagcctcagctcttcttttccaggtctgtgtctggggtggacgctgaccctgacttggtccacgtggaagcccaagacctcggtggaggtaagccgggcagtgcacaggcaccgggtatccctgagtcacctcgcacccgacacagctcggctgcacgtgtgttcagtcgcttgtccgcaatggctggccctacacagccggcctcactgtgtctcgatgtggcatgattttaaatgtgcttgttttccagctggggaggaatcgaagtcagggagctccactccagtggaaaagtctattaagggggcgatttgttctggctcctgagcattgagtgtttcccactcactcagcccaccacccctggcatgtgctaagtgtggaggtggggggcgggggtgggggcacgggtgtgcacaccggacccagccaacttcctgcccagggccgtacatgctgtgtgacaggagggtgctctgaggagggcagagcagctgaatccccacagagacatcctctgtgcaggatcacctgagccaggatgtgtccccattaaaacagaaatgccggcatcagctcccagccctgccgctggccaacctcggggcccgaggccagtcaccccagtctcctggcctgtgaaatggatagtgatatgaaataagtgaatgcagagtcctcaacgcggggtcatcatggccaagctttcgggggcagggtcagttgctaggtgtggctccccaccctcccccccctcccccacccccaccctgccacacttgggcaggcggggccagtgctattaccgttctgtgttgataaccagggcaacagctcaggggcagtccaggtttgcctggggtcacaaggtcccagctggtgcacctctcaccacccctgctgggaatgctcctccctttctgaatttcttacctttgacctcaggcaccctgccagccacctctgctgggctccaccatcccagctctgcactctccagggcctgcaactccttgagtaccagtgggggctactgatcacctgtgtccccagtaaggctgctgaatgaataagcacctagccagatgccagggttgcccctgagtagcctactgggcaaaacattgcaaaataacatgtgctacagagagaaagattcactgtccgcatcacaccacgttgtcagggttagctgtctgccctttccagagcttcagctggccctggctcatgagcacccactgtccacagctcttttcaactccatattcaccaatttcatctaggtggctcctgcatggccatgtggggttgtttataccacagaaattggcaagcactatcatcagggctactatacccagcgcacaacccatcagcctgagaggtggccctggtctgttgtgttggctccaggcctggaacactgagagcctgaccatggtgagatggatgaatgagtgagtgattgagggaatgaatgaatgaataggtgagtgagtgagtgagtgagtgagcgagtgagtggatgagtgagtgggtgaatgagtgaataggtgtgtgagtgaaggaatgattgagtgaaagagtgggtgaatgagtgagtgagtgagtgaatgagtaagtgaatgagagaatgagtgagtgggtgaataagtgagtgagtaattgaaagagtgagtgagtgaatgagtgatgagtgaatgagtgagtgagtgaagagtgaatgagtgagtgaatgagtgagtgaagagtgaataagtgagtgagtgaagagtgaataagtgagtgagtgaatgaataagtgagtgagtgaatgagtgactgagtgaatgaatgagtgagtgagtgattgagtgagtgagtgagtgagtcagtcagtcagtagactgttgactgatcctgcccctgagctagtcatttcactgcatctccagccaggcagccccactgcaggaagttcagtggttcagtgttgagtgccgggcacaccagtcagtttcaagggaacatggatgtggctcaggagggcttggcagtggcctggtgctgctgcccacgtaccctctgtgtacactgccttctgcctcctctgaacagaccgggcaggtgggcccaccccattgttcagtgcagaaacctgaggctgagcttaggggtgggcttttctggtttctaaacgtcttcccttaaccattctccatgctgccgggtcacccaaggctgggggcaggaggaggaggaaaaggaagaggaggaagaggaggaggaggaggcacccttcccttggtccccttggataaatcttcctcctggctcacaagctggaacgcagagcttcctgaggcctccaggatctagcccctccacataaatttgccccggggaaacagaagaacttcaaattagcagctccctgacaaagcatgcattcagtattgctcaaccataaatatttggaaaagggtagaagcagttgcttaaaatttgggggaaaagaacccttgagccccacccgcccccatccctgcttaggtgtgagagacttcaggagggtatgggggccgtgcatgtctgggtgtggcgaggtacccaccgtcgcctgtgctgacccctcctgcaggggatggcaggctccagagtagcacgaacaccttcctgagggttgaaggagctcgtgtcagagtgcaggtggcccacagtgagcgaggatgacaccctcagccgcaggtgtcatcacggtggcctttagaattcaagcccatgaagccacaccacagcggtattggaggaagatggagtccagcacatgtctcgggccgtctctggctccggctggagtctgaccgcctgggtcggcgcctctctcctgtagattttcggtacgtcacctgcgcaatccacaattgctccgagaagatgctgacagccccattcgcaggccccattgaccacgggtctctgaccgtgcaggacgattacatcttctttaaggtaaggttgcttctggggcttttggaaattggcaacaggtgacgtggcggatgacccgttcgcggcaaaaatggcatcgctcagaaaagaggcaataaaacgggtatttcactctcaaatgctacttcgcaggtcacggtttctgaccgtggctgtggctgcagccatccacagaagccctcgcaagcccagaactgtggctcagggacactgaggctccacctcccttctggccaccacgaacctcccagccactcggggtccccaaacctaagcccatttagccccatttggctttatcagtgactttggaactgaccaggactgcttctggtcccggctcttggccaccaggcaccggctatccacagccctgtgaccaggactctgctgcctgtgccctcaggtcacaagtgggcccaccctcagcagccatgtggtcccagctaattcagaaactctagcacacaaccaatccatccagcttttcttcaccttcatggatggggagctcagccctcccgaaacagcctagccctctgctgagtagcccgtcactggcctgtttcttctggccctgagacagagtctgcgtcatcggactcccatccactgggttctgttctgccctctgggaccctgtaaaacaaatccaaagtttcccccaaggaagccccttgagagcagctgctgggtgccctctccccagaagggcctccgtgcttcccagcctcctcctttccatgtctcagccacacttggtcaccccagcagcccactctacactcagtctgtgccaagggccaccaaggagttaggcgctagggcaggcagtgggcatcccatcccccactgttaaagcaggccagacaggaggctgctgctgccactgatcctaacctccagccctgcccagtctccactgctctctgctgagccccagcccctggcttttgatcctcagtccatgcatttgctcgtactgttccctgtgctgtgcctcgcttctccactggctgattcctgctccttctcaaagactcaatcatgcacttcctcctccaggaagtcttccctgacttctgcctccaattcagggtcactggtgcctcctctgaagacccccagccctgtgccttcctccatcacagtccaggccccactgtgtcattccgtaccatttactccttttgtccctacacctgactcaggcaagctgaggctgggctctaggtctgaaccccccacctgctttcccagctcctagcattgcatttctgcagatgtccactaagtaccagagcaaagacagtgtcagctctctgggcaaccatctcccatgttgagtggtttctaaacgttagacaggctcgcctgtcaaagccctgcagcctaagacccccggagctcacctatggccgagcaggctgggttatcactcagtgcagcaagagggaacacatgccctggggaacctgggcatctcagagaggttaggagggcctgattgtcaggtgtgggctgcaggaggtgatttggggggcttgcgaggaaaccgggtgtgactctggattgagggatgtgaggaggtgaggtcctgctaggattgggcatctcaatcaatcttctctaaagggaggggcgattcaggggaggcaggagactcagggggaggcaggagccgggcagtaaagcagcagcccttgctcatctcagccagggtgggtgtctgggcatcttgggggtttgaacgacgtccacgtctggtctgtgttcagacccgatcgcagggtggtctcgttctgcacaaggtcacagacttagcttgtctggtgtcggtgctcgcgacattgtttgtgaggggcaggagaaggtgggggccaccgactccatccagtttctatcctggtttccgtcattctcaacaactgcagaggaaagctctccctaccccagcccaggcctcccctgccctctcccttcctccctcctcccaccctggtcctcagaggatctgggagcctgtgctgggatgggagaaacctcagcccttccagccccacctcaccaccaacaaggtggcggtgctggtggctcaggaagctgcacctcctgttctgtggcagtgaggatatgtggcctctgtaatcagagacctgccacagtcctgtcctgacgggcctttctgtctctgggaacagatgcccatggccacagttcatggggttgattgttatgaggtcaaatgagctgcctgggaaaagcactcgagatggtgccggctttgtttgtcatgcctcgaggttcagtgatcacctttggtaacgagcgcatctttggcctgtctccttctccatcggaactttctccaccttgttccataagttggatgcagagcagcaaggtgctgagagagcatagggaaagaagttagttctgactgaaggaagcagaagacaacttcccagaggaggggtgttaatttggggctttgaaggatgaataggagtctgttcatttcaagcagaacaggtagaaggaaagtaaaagggcattttcacttgctgaatataacatgtagtttttcattcatgagactgtggctggagagggaatcaagcctctcaaaaatgtgtttcttcccccggttaggcaacatcagcaaaccagacaaaatactacgtctcttatcgtcgaaatgaatttgtcctgatgaagctgccgaagtatgcattgccaaaggtaaggtgctccccattccgcctggtcctgtggccagaccctaagcttatcctgactcatggggcaacaggactcacacacaggtgcttggcggtcccaggtcaggatggacaagaacagtgtggccacgcttcgtccagctgctcacccctcacaccctccattccagcccacccagcccttccagactcagctgtgcccagcttcatcctaggcctctgccaggctcttccctctgcctggttcatctttccccggaacccttgcacatgtggtatttgaggagaaatatcacttgctaaaggccccccaggcgggcccagtcctctgttttctggtcccatccctctcttctccttgctggtgcccagggtgccagggacccctccctccagtgtccatctcctgctctcctctgatattgctggggtggggatgatctctgctgtactcacctctgcattccagccacctagtatgctgcctggcatatagtaggtgctcagttattgctattgcctttcccttgccttagaaggcgaagaagggggaccaggggagctggggattgcccaactctgcccctgcccctgccttggggcctctctccaccctattaatatattattcccacctaacagaggaggtgatggaagttcagagagacactaacctgtctgagatcacacatctagttagaaacaaaggcagatctcaaactgaggtccaggtgagtcagcccagcctcatgccacacctccctcgtgaggacattgagatgacaccttctgaagatctctgtcccacatgcatagttgagaaacagatgaagcttcccttcctccacatttatttactgagcaccaaatataaaccagaatgtgtgctaggaggccatgctgtgaatcagaagccccaggttcctgctcctgtgggctttacagacggggaacaggcaggagatccagtagacagacaaatgcataaaataattgcaagttgtggtttctgctaagaagggaacaggagggagagacacagagtgatggagggcgtgtgtatgagtgtgtatgtgtgtgtgtgctcgagtgcttgtgtgtgtggctgatttaggccaggcagctatggaggcccctctggggctgggatggggagggactctttatccaaagccccaaggcagctccaagaagagcaagggagaaaatggttcgggtggagggcagagcaggcgctaagaccctgaggtagagagtgagagtggagtgggaggggccagcagctctgggccctccaaacccaggctgtggcttaatgtaaagtgcttgcacatgggagcttctgcactgggcaccctcagacctctcctgagccagaaatgggaaaagtctaggaggccttttaaaaccttcgctttaaaaacaagaaaaaaataaaaggaaaaaaggagtgagcttaatagactgaactccaggcttggctgagtatgtaaattaaaagctaatggtttcatttcaggcaaaggcagtaggtgtctgtccctctgaggtgagggaccttttcagcatctgggaagccttccctcgacctttgggggctacagcattagaagctcctgtgtcctgggctctttgtcctggtgtaggggagaggaaagtgcacagccgagaattaggcccatacagggaccctctctgctcccctctagcattggaggctggggtagctgggccagcagtcagcctgctgccaagggtgctctaaggagcctatggctataagtcatgacctctgtgaccttgagcgatggctccctgggcgtctgctccctggacctgcagatgcaatgtcagtgagatttgcaggaagcaccaggtcatgtctcccgctgtggacccttgacagtgtgcattttacactggttttcttcttcttgcatttccatggaaattggaggtcattgaaaagactcaagagactctcacagcagtgacagacacacacccagcctcaggtcattcagtttcaagggcataccagggagccatccagggcaggtggcatgtgctgtgactatcgatgtcctccctcaggggtccatgcacaggacccagtgaccagcagttgaagatgatggtcacttcctcatcaagaagtgggcaagctgggctgctgtcaggagaatggggcccccagagccctacggggtcttcaataccacatctcatgttgctgagacctttgcccagccagccagctagcctgcttcctctccacccaggtcaggacagcagcctgcccagtgtttcccaccaacaacttatagaagtggctaattgaatttcctcatcagatgttgttgttttatggtgaatttgtaacttgcctgtttcctcttcccacagactcaactctctcttttttttctttttatatttttaattgcttaattaacatcatgaaaatcatagacattggagcaggggactcacccgcaaacctctcacctcatccacccaatgtcttctcccccagttcttggtctcccggcattcctcagccatatgcaaaagggcttttacgtagctgaattatgagcagtcctgggtctccagcctgctttcacaggacactatagcatgagactgtttcttgaatgatgcgtgatatctactttaaatgactgtgaagctttttattgaggagagtgtaccttgttgagctaagccagagtcttgttgcttggacatttgggttgtttccatttttttataattataaacagtgctgcaatgaatctatgtgtgcccacaggtatttctttttaattttctcatgttaaagtctaagaagaacaacttcagaacaaaggatataaatatttgtgtagcttagttgcttgggcaagctgggctgctgtcacaaacaaagttggaatagatcagcttcaacatagctttgccatgtttttctattttccttctgtgttaaagggtataaatgataccgtcctgctgttttaatttacctgtctgtgaaaactataaagggtgggccgtttttatatttgtcaatatcttttgcttatttacttgtcatcattttttttaaatattcattttccctaacagaggtaaacaataggccaaagctataaatagagaaaagagaagaaaaatccaaataactatcaattatataaaagcattcacaagaatgggtaaatgcaaatttaaagtgaaatattcctgtatttgccataaatgtatttaaagtaaaataaaatttctaagccgtatgaataaagaaagaagtgacatcaggatcaggtaagatggcagagcaggatgccccagaatccatcttcccacctagaaggcaacgacacgggcagaacccatccagtgtaactgctttggaattctcaagtctatttgagagcttgcagtttccagggcaaggcatggatggcatatcaaagtcgatttggataatgtcagctcttagcctggtagaggcttcccatcccccaccccggccccatggcaggcaaatgtgcgtgtgtccctagagcagcgtgcacagagcttgaaggagcgggagggtgcaggggtgccataaggaccttgtcttccaaacactgaggatctgtgctctgattactgactgcttctgatgatagacatgcagatacccagacaagcagtcattattgcaaccaccatgagttgaaacagcttccaggagatttaaagggttacagcctattttcctctcttttatttttcccccttttcccttttgggagccagacattcaaaagcaactgtatatatgggacaatgtagaaaatcagcaggcatgcccagggaaaagcagaggctcagaaaaggcctaggaagatgttaagcttacatgtaaggctgattcttggtaaagagatagccaacaaccatcaaaaaataagaacaaaacatggcaagctctatggaaaggggacaagctaatttccagagttaccatattattaatgtccaatctaactggacattagactcaactgtccagtttttgacataaaaaagttacgaggcatacaaagaaacaggaaagtatgagcattcaaaagaaaaaaaaaataaattaacataaaccttccctgagaaagaccagatggcagatctactagacaaagacttcaatatgagtgtcttacagaggctcaaagaactgaaaggaaaaatagagaaaaacaagaaaatgatgtatggacaaaatggaaatagcaataaagagatagaaaaaataaaaaggaaccaaaagaaattctggagctaaaaagaataattgaaaagaaaaatttactagagggattcgaaagcagaattgaaaggcagaagaaggaatctgagaacttaaagataagacaattaaaacaatatcaagctgaggagcagaaagaataaggattgaaagtgaacgcagtctatgggagcttttggacatcatcaagcagaccaacatatgattgtgggagtcccagaaggaacagaagagagataaaggcagagagactatttgaagaaataatggcccaaaactcccccatcaatttatattgatgaaagacatgaatataagtatctaaaatttcaacaaactctaagaatgataaacacaaagagatccacaccaagacacataaccaaactgtcaaaagacagaaacttttttttttttttttttttgagatagaatctccctctgtcacccaggctggagttcagtggtacaatctcagctcactgcaacctccacctcctgggttcaagcaattctcctgcctcagcctcctgagtagttgggattacaggtgcctgccaccatacccagctaattttgtatttttaatagagacagggtttcaccatgttggctaggctggtctagaactcctgacctcaagtgatccacctgcctcagcctcccaaagtgctgggactacagccgtgatccaccatgcctggcaaaaagtcagaaactcttaagagagaatcttgaaagcagcaagagagaaatgacttattacatacaagcaataatcaatatgatcatcaacagatgtctcatcaggaaccccggagttcagaaggcagcgagctgatacattcaaagcgctgaaagaatttgatgaaggtgttggttcattagactctttcatgaattttatataaacatctatgaagaaatttcctctgtcatgtctattaaaaatgtttttaaacttttccaaaattactcatttaaaatgcattcactacaactaatggaagaatacatctatttaccttataatacaacataataaacaatactatgtatatgtgtagataccctttctacctgcttgcctctctagtcctcccttccctgacagtctcacttcctcactcctcaaggaggtattgttgaaagtcctggatacccctcatatccattctgccccttcgtcttagttcaacaaaccccagactttggctagtacattgcttcccagctaaaagactgcattgcccagctttctttgcaactacatgtggtcatgcttgtaaaatctagccagtgagatgctagtggaattgtcctacgtggcttcttagagctctctaataaagagagctttttcctgtttctgttactcacaagcaaacctaattctacctaataacaaatattggcaacgttggtgtttccttccgcatatttctccaggtcatacaaatatgtacaatcacatatactatatgtatatttgaatgtgtcttacatccttcatgtaaaaatatcaaaatgtctctgcttctaccttttctcaaagaagacagtaaatgcaacatgaagcgaaaattgcctgttatttataactctaatcagcaaatatttttaaaagaccattctcaatattggaatacataaaacgaaatacgtgccctctactactgctggtgggggagatactaatgtaaattttcaggacagcaaattaacagcagataacaagagctttcgaaatgttgcgatgtggcaatttcccttcttaggagtttatgtcatggaaataaccagagagccagagatctgtgtctagaaatgttcatgaccatctcgcagttatgttgagaacgctgacggtttccccgtagggaagcagctcagtggaatatggcccgtccacaaaatggaatatcatgcagtcattaaaagtgctgtgtatagatcactttaatggcagagaaaatgctctgcctgtgatgtaaaggggcagactataaactacacatgaaaaaaatatgtgcaccacacttgagagaaagcccaaacgtaaacatttgaaaacgctggtgcgaggtctctctagggggcaccagtcataacctcgagtcactttatgcatttttctttgtttcctagattgtagaacacatttacccaatgcatttacccaggttatgtaaacatttacccaggggcataggaggcaccatgtgacttgctgcaatcgctgtaaatacggcatcctgacgacatggttgacgccaagcccccgagctcaaagcacccataatctcagtccccccaccacccctgcaggagtctcacatcctccctgacaatctgactgcacggtctaattccctgccacggcccaggctggtggacaaaccttcccctagtcaggcagcagaatgaccaacgcccggatgacagagtgcattttggcccatggcgctgagcagggaggaagggggagctgaggtgaggagggcagaacagccacaagcctgctgcctccgggcacttcacatgcctccgtgggctctgcatcacccatggtcccacttcacacatggggacggccaggctctggcaccctgccccatcatccttccctggttctgtgtgtctcggtgccagtcatttctgtgtgttgaatttcggtccatagacacaggactgtggctcctgccactgtggggtcctctctgcctgtgggctgcatggtagctccaaaatagcaacactcggccgggcgcggtggctcacgcctgtaatcccagcactttgggaggaaggcggatcacgagttcaggagattgagaccatcctggctaacacagtgaaaccccgtctctactaaaaatacaaaaaattagctgggcatagtggcaggcgcctgtaatcccagctactcgggaggctgaggcaggagaatggtgtgaacccgggggggcagagcttgcagtgagctgagattgcgccattgcactccagcctgggcgacagagcgagactctgtctcaaaataaaaaaaaaaaaaaaaaaaaaaaaaaagcaaccctctccttttctgcacagcccttggggctgcatagcacagggaacaggcagggcagtgaggggaaggggccgggcctcagcgttcaggagtccagcccgaccctgagccacctgccagggcagcttcttcctcattctccactgaaaactgagctccactggacagaatcgggatttgatctgttattgtacagaaaaaaaaaaaaaaagcccttccctaggccctcctatcagatgagaacatgcgaagggagccatccccaagcatcccagccacagctacaccgtaattgggaggggcggctccgcaggtggggccagccggaccctcctctgccacctgtcctctgcccctggaccttggcactgtgttctcagagggtgatgaagctccagagtgagagaaggcaaaggaacagaggtgggagggaagctggttagggcttcaatatgggcctgtctggacccttttactcttgcctcccacatagcatttgttgctggctgggcaagaaaagaaaacaagaaactgaggtattcccagttttcctttttattcttttgggttttggctgcttcctgaatttaaaaacctggggctgaacccgaagcgctgagcccactccagagctgcccaacacacctgcttctgagtggaaaccgaggctggggactttgccctggctgcccttcaacctctgagactagcttacagggtcctggtggggctccttctctgcctccccctccagactgtgcccccagggctcagggctggcagggaccggcacagggggactggaaagaagtctggcacatgtacaggtggggatattgtccccagacaatgaagcttgagtggatgaatccacggtgcctccctgcaggtcgcagaggacagggccacacctggctccccactgcactcagggcctttctaggcatccagtggctggaaagtttctggcatggagttggtacttcccaaatgtgtcttgaatgaaggagggagcagagactcacctgggctgtggataggaggagagggaggggctccagccctcaccccctggaatcaaccatctgggggtgcatagaggaagaactccgcctccccactgttggacggatggatggacggcctgatgtgggaccaggaggaggaggtgtccccaggccaccctcccataacccggcgtagagcatcccaacgccatccccattttagagatggggaaatggaggcccaaggaggtgaggagacttgtgcaaggccacagagcccagagcagccgagccaggaggcaaacctaggccaggctggctccaggagagccaggggtcttctgcaccctcacggcctgtgcagcctgcttcttcctccctcgtgcagcccccagcctggctctgaccctgtgctccctgcacatccccacaggatctgcagatcatcagcacggacgagagtcaggtgttcgtggcggtgcaggagtggtaccagatggacacctacaacctgtaccagtcggacccacggggcgtgcgctacgcgctggtgctgcaggacgtgcgcagctcacggcaggcggaggagagcgtgctcatcgacatcctggaggtgggtccagggtggatgtgggccaggtctgccgccgaccccctgccctctgccctctcaccccacctcttcctcccccctcccctcccgcctgtctatatagctgtctcaagggtctgcacacatcttctgtacacagccaaatattttaggctttgcaggccaagaggctattatgtaggtatttttagagaaagagaatttccttcttgaggaaattcgaaatacaatgatcatcaagtataagttcttgtcatgagaagaatggaattctttgagggaataacattttactgacttgggttcagcctgagtgttctctgccagctctctcacaagccctcatcagacgtcctgggctggggtcacccctgagggcagtgcttctctctgagtgccccatctctctccctctctccctctctctctctaccccagccccttcgtctcctccttcctctccctctgtgtgtctgaaatctgcctttctctctctctccctctccctctctccacccccgccctgtcatctcctccttcctctccctctgtgtgtctgaagtctgcctttctgtctctctctctctctctctctctctccctctctccaccccagccctgtcatctcctccttcctctccctctctgtgtctgaagttggcctctctctctctctccctctctccctctctccctctctccctctctccctctctccctctgccttcctctctccaccccagccccttcatctcctccttcctctccctctctgtgtgtgaagttggcctctctctctctctgtctctctctcacactcgcttgctttcacttgcttgctctcgctctctgtctccctggaacccagccctccaccctccctgctgccacttctctcaccacctacgaagctctggcctcccctcctcagttgccgtctgagctcagatgggagccttcctcgctgccctcctgggtccccctcggcctcccgcgtgagcctccactgaccccagagaacgccccgtgcatcgcaccaatgtggctccatttccatctggatccctgcagcagccccgccccggccaggccgctcacaggcctctcctttgttcctgagatgccatggccagcgaggggggctacttgacccatgtacaggccagaaaactgaggctcagagaaggcaaatgacctgcccaggcagacgcagacataagcaggaaaaccaggaccggcccaggcctgtctgctttgagcctggtgccctcctcttgggacccctctcagttgttcacctccaagctccttcctcttgcctgtggggacaccccccagtggcccattgatgcaggctgggagagtgtcccgtgggtggccagtagaccctgggcaggcagtggcattgacaagcttgtgagtgggaggcagcaggctcagcattcatccctcccttgacagcagcagcagaactgtggtccccaggaaaatcacaaatggaaccatttgtttgcaataataacccatttgtcagggttcatctccccagcagacgatgcagatgcagcctcactgccaaaagccccctgcaggcggccctcctccacctgctaggcagcgcccacccccacccctagtgtcccaaaggccctgccctctgagcctctaggaggggactagttccagcacagacctgcctccggaaggcagtgggtgggtggtgatgggatgggaagggtgccaagaacagggtggggtgggactccacggccaacctgtccacaggcatctgtgatgcctgcaccaccgcatgccatgctctggtccctgccctcgggacacaggctgggtacaacacgcaccattcacccctcatgaagcaggaagacggctcccagctgtggctctgagtgagagtgctggggcctggagacacagcacaggggcggttggccagcctggggcaggagtcagggagtgcttcctggaggcggctgagcaggagttagccaggtgaggaaggaactcagagccacacacacaggcatcaaggcgagaggaagcaaggagccagaagaagttcgcagtggcccggtccaaaggcgacacccaccgtccaccagctgggtgccctcccaagggatggcccttctctgaaaaccatcaaacatgggtcacagctggtggttacaagcacaactctggagcctgactgcccggggttcaggtccatgaactggtatgtatttgctgtgtggccataggtgggtttcttaacctctctgtgcttcctggagacacagcacaggggcggttggccggcctggggcaggagtcagggagtgtttcctggaagaggctgagcaggagttagccaggtgaggaaggagctcagagccacacacacaggcctcaaggtgagaggaagcaagaagccagaagaggttcgcagtggcccggttcaaaggtgacacccaccatccaccagctgggtgccctcccaagggatgtcccttctctgaaaaccatcaaacatgggtcacagctggtggttacaagcacaactctggagcctgacttcccgagggtcaggtccatgaactggtatgtatttgctgtgtggccgtaggtgggtttcttaacctctctgggcttccctatgtgcaacaggaatggtagtggcaccttcctcacagggttgctgtgaggtttaaggctgtcattcctattaaacaggcagagcagcgcctgtttccaagtgagcactcactttgttttcccagcacttgccctttctggggatcagggataattcatggtggggctggcacctgagtctcactgcccacggccagtactgttgctgtcgtggttgttgtgcacccagcagcacatccaggaaaaaaatgtttggtacagacggcagagccaggtactgcctcggaaggctgcaggggtctctcccccagcagggcacaacccaggtgtgaggcaagacagcaaacatttcctaggctcctcttttgctggagcttgggttatgaatggggacttaggggacatagccctgtcccctgcccccaaggagccctggccacaaggcatcctaatgggctgaatggtggccccgaaatagacatcgaaatggtggctcacatgctaatacccaggccctgcaatgtgaccttatttgaaaagggatttttgcagcgtcatgaagtgaaagactcaagcactcaagagatcatcccatattatccaagggactctaaatgcaatcacaagtgtccttatcagagacaggagaggagccacaggcacacagagaggccccatggagacagaggcagagaccgcggccgcacgccagggagggctggaggcgcggaggtggaaggggcaggaaggatgcttccctggagtctgcagagggagcgcagccctgcccacgccttgaatttggactctagcctccaagagaatgaatttctgttgtctgaagccacacaacttgtgggacttttttttttttttttttttacagcagatgcagggaatgaatatagctgtgatatgggcagttatgcagagacacactgatattctaagctgatgctcagccaatcagacccacccgggggccttggcctatatctggatccgtgttatttattgctgagcattttcatggagacccagctgggatataaaatggcagttacccaataacacaaaccatcatgggaaaatcatccttctacctgccctgaggacagcagaaaggcatctgcaccaagcactagacagggcagaagccctctgggtgatgtccctgggtccccatcctgcctgccttgtcagggttctatgagcttgtaagacacaaagacttgcggcacattccccgggcctcccttcagctccagaccacacagcaaacgatgtgcagccatttgctgggtgtgcggcttgtccgaagtctagcacagagggacctgtctgcagccaatctataggcaacactcacactcatactcacacacagagacacaggctcacacccatgcacgtgccccaccctctcccagccgccggcagctcctctcctgcagaccaaggccagagtctggggagaactcgagacccctgtgacatggagtcctgggtttctgcagggcctgctcttggtaccacatctcacaaagaagctggactctgggccaggggccccatctgtagtcactgagtcgagtgagcaggagacagagtgatgccacatgggcaagaaggagctggctcctcccggcccctgggactgtctgcccaacaggaccattgatgaagcttcttctgcagagaggaaggctaccctctagaccacagcatcctatgcagataatacaggcagctgaatgctctgtgcatggatttgccacatgtatggcgttccctagaaactctgggaggctgctcgcagtgtgatccccttggctcctgactctgtctgcctgtgttgataagacctggtgggtcccaaggaaaagagcctgccctgccccccaactcccacatccaatgaaggcagccctgagtctctgagagccaactccgagggtaacctaaacaagccacagccatcagtgggaggcaaaagatctgtaccaccatgtgcctgtcccaaccttgcactttgaaacagataatttgtttgctagtttcccagctccacagatggattttacccagagctcacccacatctggtttagatgactcagatgataaggtttggaacttttgatctggtgatatttagatgagacttttgactttgaatgaatgctgtaatgagatgagaactttggaaaccttgatggggtgaatgtattttacttgaagactgatgcgtgtccttgggggtcaggggagggactgcactggagagaatagtgaccccctcaaagatggccacatcccgagccccagaacctgcatgtatgttaccttatgtggcagaggaggagtgaggttgcagaaggaattaaggctgctcatcagcagacaggaagatgacctgggttatctggaggggcctagtgtcagcacatggatccttaacattggaagaggtaggcaggagagagagtcagagaagatgtgatggtggaaacacggtcagagagatgcagcgttgctagctttgaagatgaaggaaggggccatgagccaaggaatgccggtgcctctagaagctggaaaaggcaaggaaagggaagctcctctggagcctccagaaaggaatgcgattccactgacacttaactgtagccgcatgccaggcttctgccctccagagctgtgggagaatacgtgtgtgttgtctgaagccactgggtttgtgaccatctgttatagcagctgctggaagctcagaccccagtctgctggtttcatcatcatggctgctgttgttctccccataaggacctgctggagttgtgagaattcagtgagaggacacattttaagctcagtgcctgtaacatagaagcacttaataactgtatgccgttactatcctagagggaatctttggttatgggcctttgggcaggttgcaccccctctgagcctcagtttcccatggtgcatgctgcatatacaggtgcagaaacagcttctggcctggcacacaggaggccttgataagtggtgggcattcccgtgcctcttcacaccacactagtgggtcttgataaatacgggtcaaaaccctccatgaaataaggaacttgcaggaaaagaccctctctgggagcaaaccactcggttgaactatgtgaagttgctgatagttgcacgtttcttataggtcaacttagtaaccactcttggatatgtttgggtcactgccatgggcctcttaggaaaccttgagaaagggaccaggttagccctgagcaatgaaggcaagtggagccctgtcccgggtgttctagggtaagcatggaccctcctgtcttcattccttggcatgtttgtatggggattgagctgggggtccgcagaggcaagcccagaggcaattctattggtccaggatgtgtggtccaatagaaagaagaggcactgggaggatctgagctctgaatcaggacctctgaggcaaggatggggtgactctgagggacaggcaggtcagggctccagaaccccacttgccatctgatggttggtgtctggacctgggagaacagctcagcaccatgaaaatcattcaggcttcagagctagacagaactagcttcccactaaaactggggccagagtcttgaatccctggcccctctaaacctcactcacctctagaatgtgtctcagctgctggacattgtgactgtgaaatgaggccacatgtgcagagcactttagcaaggggctggagcatggtggatacttggtcatcagagtgctccagtgtaagtttacagtccttcttttatttttgtcccaggtcagaggggtgaaaggagtcttcctggcaaaccaaaaaattgatgggaaagtgatgacgcttataacctacaacaagggccgcgactgggattacctgaggccacccagcatggacatgaatggaaaaccaaccaactgcaagcctgtaagtacctctgctcacatcacacaccatccttggcgtggatgctagatataacttcagtaatcaagaaggtcagaggtggtgatgtctgagaaggaccatctgagacacatgaaccacctatttctgctgggtgtggtagagagggtcaaatgaaactccttgttttacagaaaagttaattggaggtcagagagggaagtatatcagtttttgacacagaattgctgtgcaataaaccacccaaaacaacaacatttactccccagatctacaggtgggctcagctgggcggctctgctgatcttgtctgggctgagctgggcagctctgctgaccttggctgggatcagctgagcggctctgctgaccttggctgggctcagctgagcggctctgctgaccttggctgggctcagctgagtggctctgctgaccttggctgggctccgctgagcggctctgctgatcttgtctgggctcagctgggtggctctgctgatcttgtctgggctcagctgggtggctctgctgatcttgtctgggcttgctcatgtcagggaatggactgatttaggctggtctctgctctgcacatcttgcatccttctcctggaaccagcttaattctcatggtgataccagaagtacaagaggataaacagaaacaggcaagtacaattcaagcctgctggtacatctgctaaatcttactggtcaacatcaaggacctgggaattgtactctgcccatgggagtgagggctgaggagcagacacttgcttctaatctgccatggagggcagtgtaccatcgcactgccagtaagtgatagagctgggccagagttcagacatcctgagccccaaagctggtccactatcccaggggcacctttctacatgaatagaagtatcgactgcctgagtccttggttgcctagagtggagaatctctcaaagtagctgggactcttgcccgctctcatgtggctaccagggatccaggtggtgcacaggcccatgctggtgaggaaggagagacagagctgtaaggagccctggtcctagctaaggtgagcactcagctgccagggaccagtggatgcaagggaggaagaggcgaaatgggccaagagaatctgaccaggcttctcactccccttccaacacccctgtgagacacggcctctcccggggcttctctccttgcataccgcagggagctcaccaccaccagcatccctgccccttcctaggtgctgggcaactcagggtgggagaagggtctagtgttagagccgcacagagctgcagtcttagccccctgactatgtgatcttggctacatcaaccagtgcctctgagcctctgttgaaaacggaggaagatgataaacatccctttggcattggagtgaggatgagatgaaagaatgcagagactggcctatgcctgacatggagcaatctgcaaggaagagccaatcccttccctttcaagctctccctctttctacgctgtccccaaggcctagaatgccctttcccttttcctcatccagcaagctcctactaacacctgaaaaccctacccacatgttccttccactgaggagcccttcactgggcatactgcttctctgtctgtttcccactgtcacccataagcccttcttagagactgcaccctggggacacctgaaaccacccatcactcttcctcagcttcctcatgtgtaaaatagaaagaacaaaagtacccgtttgacaggtttatattcagcaaatctgcgtgagcacttgcaatgtgccaggcactgttctgcaggctcagaacacaccaaccagcaaaacagaagacaattccctgtcttcctgggattccacctggcacacagcagggctcagaaaatggtgagccccctccccaccaccaccaccagccccagtgttggcccatggaggccgtggtactaagaggggaggaattcctcctcccagagagccctgaccctggggccagggtgggactctgtggcccccagggcaaccccttgctctaagctgaggcttgagctctgactcgtgaacactcacctctcaggggccggctgcccgcctctgctcaagccccgctcctgctgataacacctgtcgacctgtgtggagaattaattaccagccctttgtaaaaacgcttcccagaacagaattgctgtgaaagggctaatttttgtatcatcattggcaaagttaagccatattaatctgtcaaagcaagtttttgctaagaatagactcttgtctgcgattatgcagctcagtgaggagataacctcggtgagatttatgtcctggccttgaaataatgaaatgggagcaaactggtgagcgtgtggcctcaggcaggcatgtgggaacccgactgggcacggggaaatgcagagccaagtgcatggagcccacgtgggtacaacagacatcaaattacagcctcacgggctgggcacagtggctcacacctggaatcccagcactttgggaggccgaggcaggcagatcacctgaggtcaggtttgagaccagcctggccaacatgatgaaaccccgtctctactaaaaatacaaaaattagccaggcatggtggcacatgcctataatcccacctacttgggaggctgaggcaggagaatcgcttgaacctgggaggtggaagttgcagtgagctgagatcgtgccactgcactctagcctgggtgacagagcgagattccacctcaaaaattaaaataaataaatatatatatatatgacagccgtatggctcagaaggcctgggctatcctgtgtgtgtggccatggcatctccaagggtgaaagtgcaggggcaggacaagttgggccactcacagcacctcctgactgtgtccctcctgcagccacacagcctctcaatgaatgggcaaactgtacctgaggacttagcgctcataaaagtgatgcctgattattgcagaatgcttggaagatacagaaaggtataaaaagggaaataaggtatcaccagaatcacaccatccagaaaaacaataactgggcatttttgttctttacaatcttttcgctcatacacacgttatgaagttgtcattgggatcccacacgtgcgtgatttttcagccctctgtttttctctgaactctgggtcacaaatctttgctcaggccacttgaccagcttcccgtctggggatacctccttccctcaatggggaaatgcagggatggctttaacaggagtggtgtgatcagatctgttttaggatgattcagcttcattggaaagtggtttgaatctgtttgcatcttgaattcagcataaaacttcattcaccgtgcagtccatggtcactcttctaaggcgtgaggctgcagtgagtgccaggcgtccaggtggctggtgctgcatctcccggccctggtccatctggtaggctttgatgatttgctagacacttctttagggcaccctctggcccctatgtgccaaacggacagagaagggagagtcctggagcagtgtgagtccccagcttggcctgcctccagccctgcaggaacccgggcccacctcggtcaacactggagcattctgcatgcactcccagggccacagcctgccccggggttctcctgtcctcgtccctgggtggcctcagaggaagccctgtctctgaccacatgcacccaaggcgggttctggggctcctgatgcgcactggcctgccacctgtgcaggacatcctggtgccccatgggcaggcacctccaagcctgccggcattgcccttcttttcacctggtgtcccaggcttgcgtgggagtgcgtgtgtcagacaccagcatggcacctgcagctgccccaggagaagggggagccgtctgtttggccgtcagcaggccgcaaggcgaatgcaaaagggttcatagagccgcctgtgttcaccagtggcctgcaggccgtaactggccaccccacagggaaccctgaggagggttccacttctctggcctgagtgccaggcaaccagaataggccactagtggcgaggggtggggagaggtagctagggtttgtgaagcagcaccctctaattcaactctaaccactgtgcacgcagcaagtgaccagatgtgcacagctcatcgggggaacgggagaggttgacggagaccaacccatgagctctggccttctaggaaacctagaacagcaaagcatggcagagccagggcgtcctctgccgggcacactgctgctggggactcctgcactacaccttctccttctcctgattagagctcccttctgcagcgcagaagcccaaccctgcctaccaagatcacagcagcctccctcctcagcaagtcgcctctgtctttctgcctgagctatctggggtggggcaggagggtaggactgaaaggtgccagcaagtctattcactcgtaggcctgcttttccactgtaagaaatcagaaaaatctattgcagcgggcaacgtcttaacacctcacaggttttcattggggcccatttgtcactattggatccaggtgtttccggaaccctcagatggctctccaggggtgacacagtgcccaggctcctgccacccgaggccctgtggtattcagctccgggctccccaggttccactggggatggtctcagtccctcagtcatcttcaggatgtgcgtctgcaatggacacagggccacctttcagctgaattttcaacctttctttttttggtttttaacagctttgttgagatgtcacatcctgcacagttcacctttcaaatgcatagttcagtggcttttagtctattcacagagttgtgccaccatcaccactgtcccttttaggacattttcaccacccaaaaaaggaaggccccgatccttagctgtcacctcgctatcccccatcagcctccagcccctagcaaccaactgtccgttcctggctctgtagattccctgctccgggcattgctcatgggtgaatcgtacaacatgtaatacaaccagtacatctgttaaacccttgagcagacaaataaagcctgtctgccaactgcggccaccacctggtcgcatcttatccaagtcaatatccaatttcctgaatggtttaacttttaagttagagtcacctgtgtaaaacgtaagcaattcatgggccagaagaaagtgttataaagacatgaaatgaagagagaggatacctctgacgtgatgttagtagatgatatgataccgcaatgacgaggggattctggaatgacccctgcagagcgggtcagcaggcctcaccgtcactgtcttcattttgcagatgaggaaactgagtcccaaggctgcccagaaaattagtggtgtctcctaagttacaatttggatctctgagtacccagttctagcgtacttctaagctggagatttttaacagaaaaaagtaattttaaggtggcaaatacaatgtttaccattcttatcagtaaacaattgggcagtatcttgcccaggggaagggctggaccccagagctgtgccatagtaatccaatatcctgtgaagcagaggttattgccccatctcacagagaagaaagaaaggcacagagaggctaagcatttttcataaggccacactgccatttagaggaggtacgaggagtccaagccctgccctttctgtgaccagcctgaggattgcgctgcctcacttcaccctatggagttccctgacttggggaaattaggaaggctgagcccagagtcattaccccacaaagccttttggcatctgttggttcagtggggtctctcgtggtgcacccaaggagggctcggccagccagacctctgggacccagtatctcaggctgccagagagagatcaggaggaatggggtctccagagacaaccccctggagctcttgcacacttaacccacccctctgtatctcaaagtgagagggtcttacggggtgaccccagctgtcctctgatgccagggatactgtggtcacataagaggctcccaataaaggttctgggtaggtgaatgaataagtatgagcttgggctgtgcaggctccaggaatcacatcccatggcccggcacttgacccggcacttgggctcttgaccgatgcccaagagccctcagtgggagaagccccagcagctgcatccgtgagcagaggcaccacacccaggggctgtaggagtccctaatctagattagggaaccaacagatcctcccaggtgcctcacttgtgcccacttccccctcccaggctgtcagcacagcacctgctgaagcttcccttgtacttcccaccctttccctaaaggtcagcctcacacctgcttcccatcctccatccgttcctccaaggcactcctggcccagccttctctcccaaaaagccacaggggcagatttgtcatcaggcttagttttcctaaggatgctcctactcatgtgttgacagttgcgtcctttctcttccttgcagccagactgccacctgcacctgcacctgcgctgggcagacaacccctacgtatcaggcaccgtgcacaccaaggacaccgccccaggcctcatcatgggtgcaggtaggtggcttccatcacaggtggctggcaggtgccattacagcccaagagtacctccaatcttaagggtaaaaagggatggtcatgagcctgaggccatagtatgtcctttaggaggcagtaccactgcatctccaggaagctcagctctcatggcaaattccgagaaatgaatgcatggcccagggtgggcatatggtatgtgttggcagaatggaaagatggacagatggaagagtggatgaatggatggatggacagacaaattgatagatgatgaatgatggataggtggatggtggatgaatgatggctggctggatgatggacagatggtgaatggatggatggaggatggacagatcaatggatggatgatggatggatgatggtggatgggtggtagatggatggatgagtggatggatgagtgggttcatggatgatgtatgatggatagatgctgaattgatggatggatagatgaatggatagatagatgaatggatggatgatacatgatggatggatgatggtggatgggtggtggatacgtggatgggtgggtgggtggatggatgagtggatagacgagtagatggatggatgagtggatgaaaggatgagtgggtggatggatgatggatgatggatagatgctgaattgatagatggatagatgaatgtatgaatgatgcatgatggatggatgatggtgaatgggtggtggataggtggacgggtgggtgggtgggtgtgtggatggatggatgagtgggtggatggatgatgaatgatggatagatgctgaattgatggatggatgatggtgggtgtgtgggtgggtggatggatggatggatgagtggatgaatggatgagtgggtggatggatgatggatgatggatagatgctgaatggatggatggatagatgaatggatggatgatgcatgatggatggatggcggtggatgggtggtggataggcagatggataggtggatgggtgagtggatggatggatgagtggatgggtggatgatagacggatgatgggtgatggatagatggtgaatggatggatggatgacgaatgaatgatgaatggatagaaaaactgatagatgggtaggtggatcaatggatggatgatttatatcatggttgatatttattggcccctgaagaaagttctagtttagtggggggagaaaaacaagtatacaactagcactttttaaaaaacccaaaattataatttttgtgtttgtctcttccactaaactagaacatccaagaatcctggtgtactgattaaataataccataaaatgaggttgatttgctttagaagaaccattcaaaatacaaagtagagccacctgtctgaggtcgcttggctggtgtgtgggagaatcggggaatactttgcacatggggtctgtgacagtcagacaggcagcatctcctgcagacactgaacagcagaggcacaggcccagagttcacacttcctgaacccaggaccccttccctccatttcccccagcaccatctgccacacagagggggtggctgtgtggccagtggccaaggaccatatggatgtggaccccagactctgagctggacaccacatcttacccttcactatatcgcagcaccgagctggggcctggcccagggtgggccctccaaggctgtttgtgaatgagtgagtgaagggacaagtgaaagagcggccatgttgtgatggcaggaatggccttctgggtggaagggggaacgtggggaccccaaaggaccagaccagagtgcagggagtggctggaggtgaagcctacgtgcagggctgggtctgacggcagagacctggcctgtctggggagcttggagctttgcacctgggaagggaggggattgtgaacaaagcccttcagcttccggagttcctctgcatgctctatatgcccggggtcctaggcagtgacagcccatctggacagcctctgtctgcccccacaatgatcaacgaaaatgtgacccatcagcatcaatgtgaagccgctgactgcctatcagcttccacgcacagacaggctcaccacccacgttagacacccccaatcctgtacacttggtttcccgggctcctcaatgacagggtatttaaaatgcactgtcttgattcgctgaaaccccaaattcttgaccaaagtgcaaaaaggcatgatttccaatgtttccactgctcaaaggccctgagagcccagaatgagggtctcggtctcccaacatctctcagtgcacccctgaattgtgcaggagtcatgcaaagcaccgagagcagcccccctcactctgtgggggtgtcagtcacagccttcctccctccctgcttgccccccactgtccctacaagggcaggagactacacttctattttatccacttctattcagtcttggccagggctttcctggaaggtggagccaggcatgcaaggtgggccaattgatgtgtccattgtttccagcctcctctccagccctgagcatctgctgggagcaggaggaaaaggcgcgtgggctggcttcacatctgctggcccgacatggctgcctgccctggcacaggtcccagtgccacgtgaccgcactgctggaggtggctggggatgatggctacctgtttccacagggtcgctcccctgcccaccccgccgttcattcctgaattccatcccagaggcaggcagacaagagggaaaagccccaggctctatgcctcccagctgtaggactctgagatttcactgcacttctctgagcctcagtttcatctgcaaaatgagaggataaaacctccactgtaaggatgagacagggtatggcaggaaaccttcaaggcaggtgtggtctgccaggctgtcctctcatccaaggggacactgggcactcctgcccccatgccaggcactgcactgggtactggaaatgaaggagctaagactcagctgctcggggttgaacagaggagcaaagggatgatgaccgcagggccagaagcatcctgatgccgagtgttcctacaagatggtccagagggacacagggtatgggcactcgattcttccctggggtttggattgagtctgctgggcaaatgggcatctgccaagccgacacacagggaggacactctaggcagagggcaccgcgtgtgcagggtggaggtgggggagtgccgcgctggggtctcgagctcgaggagatgcattccagtctctggggcccatcctcaggtccagcctccagaggtcagactgcagagggacccagaaagtggagccatggctccagctactaatagaaggggatggatttgagaagcaaagacaaaaacttgacttttaaccccccggtggagaatcagccatgttgatcccagaaatcaacccagccctggccgagggtgccggtggcgggttcttcccgactgggcgtgttgcaggactgaacggctggctcccttctgagtgctcctgtgttggagtgagtggcatctgaaggatacctcatcttcaccctttcttcctcatcttcaccctttcttcctcatcttcatcctttcttcctttcaatagactaggataggaatcctcacactgagttataccctgtgagatcaatgtttcctgctccacaccttcggggatcccagcgagccagtgttcccggaccctgcacggcctgtggccagctgcctcccaccacccctttgccaaggctgctctccatgcccagggcaggtcctcgggttcctgctccagctcttgtgcctcccctagaaagccaaagagtgcagagtgtgtgccaacccccacctgctcctcagatgctgtgggtgccccaggtgattatggagcctgctccctgcactgtcctttgccccatcctggtcactggtctgtgtcccagctgatcatccagacgtcctcaggatccaacacagagcagaggccagtgaacacttctccatccctagccctggcagaggtgatggtagcatttagccaagaaaagcttgagggggccgtttgggagctgggagcaccacagcctgccctgtgctgctggcttgactcagggaactgagtctcagagccagttgcaggcccagccctccctagcacagtcccttttttggcgactcggccagtcaagggcccatcaatgtcaggacatgtctagatgtgagggcgagaagcccttgggcctggctgaggggcctgggtggggttgggagctgaactgagccccaccagttctgtggacactcaccgggcccttctagagatgggagcaccggcggaacctggaagactatggggcagcccactcacctgggccccggctgtgtcttggtgatcgccggtgctccctgtctcgggagccattggcgtctgccccgcagtcctccttggtgaagtgtgggtggggtagattttggtgtgtggctttgctctgttttctggctgcaggggcagaggaaggatggagaggaagcatgtcttcattcagtgagcactgactcctaccactctgctggcatcaaggaagggcaggggtcctgggcctgaggagaggaggcccaaagagacaccagaacacccaggcagggaggcagcagagaagcttctcccctcatcacctccctccaccctgggacctcagtttcccatccataaaatgagggtgtcagcctcagctttctggaggcccttccactctgacagcctgcaacgtgttccgtgaatcgctccttctttcccccgagactgttaggtgacaggcagcctgacagctttggtagacagagcaaggaaaacagatagcatttcttaaaagacagacgtgtgcacatttgaaattacaaactgcaaattggcccgcgcagtgtgctgacgcggcaacactccctgcccggctccgcctgtgatgcgtgtgtcccagagtggctgctggcgcctgggatagcagaaagataaaaggcatcttttctttctctcctccctgctgcttcttctgttcattcattcacctcactcacttcattcattcagcagccatcgctcagcaccttttgtttgccaggcaccacactgcacagattccacacctgcccctctgccccacccatcctatctgtcttgcacctgcccgggtccacatttctgcccaggctgctccctcttccttggacacccagtcccctttcccttggacagccacgttcagctctccaggctccactcggaggctctttcctgcctgagtctctccttgaggctctccttgaggctctcctcacaggtccaccgtcctggctctgtgttcacctgcacggccacccttgtctgctagattcagagccctcagggagcatgggccacagctcattcagctcagctcaccagagctcagcacagggctgtgcagagagtagacactcagtaaatgccattgaatacatgcaggagagagtgagtggtggaactcagataataggtagatggagggatgatcaattggatggatattagattaataaaagatggatgggaggatgcatagatggatggatgagtggatgggtggatggttagatggatgggtgggtggatggatggatggatggttggatgggtgagtgaatgggtgggtgggtggatggatggatggatggatggatggattggtgggtggatggatggatggatggatggatggattggtgggtgggtggttgggtgggtgggtggatggttggatggatggatggattggtgggtgggtgggtggatggttggatgggtgggtggatgggtgagtggatgggtgggtgggtgagtggatgggtgggtgggtgagtggatgggtgggtgggtggatggatggatggatggatgcatggatggatggatggatggattggtgggtgggtgggtggatggatggatggatggatggatggatgggtgggtggatggatggatggatggatggatggatggatggatggatggatggatgggtggattggtgggtgggtggatggatggatggatggatggatggattggtgggtggatggatggatggatggatggatggatggatggatggatggatggatggattggtgggtgggtgggtggatggatggatggatggattggtgggtgggtggatggatgggtggatgggtggatgggtgggtgggtggatggatggatggatggatggatggatggatggatggatggatggattggtgggtgggtgggtggatggatggatggatggatggatggatggacagatggatgaataggtaggtgggtgagtgggtagatgggtggatttacgagtagctaggtaaatgaacttaataagacaggcacacaaacaccctgccactctgagaactaacttttaattcatctatttgaggacaatccatcttctttggaattttccagtgacttctaaacttgaccctggataaagtacttctgaaagtgccacctaaataaagcttcaaagggcaaatgatatacaagtcacccagggtggggcctctggggccccagaacagcttcaatgccgtcatcagggtccccatcatcctggagacttggacccctgtctctgccacagccattgggtacagtggaagtcccaaatctgtctcatcagaaatcctttgttcaagctatttcaggatgctggttagggtgggccaggtgcagcaccagaggctgtgatgattttcctggtgcttgtgctgttatgcacggccgttgttctttctacaggagactcacgtgggttcagcttcctcatctgtaacatgaggttggcttggatgctggccatgagttcttcccattctgacactgcccacagcattaagtctgagcccctccgagtaggcatcaaggctggagatggacccaatcagcccagtgctggggctccagtaaacccaaaccacattctgcacccccagttggtttggtgcccacctcaccttcctcccaaatgtccacccagcagatagtgagaccctggtgtgtgcccacctgccttctctcctgcacctgcctctggctcctctgcacccggtgcccaggagctgtctccaaacacaaactcggccatgtcctgccctgctttcaagccccacaggggctgcccatgattggcccacctggcccacgtcctctccagcccatccctagccacactccatgcttcttatttgtggaccacactggtgggttctctgaggtacctgagctccacctgtcccgggcctctgctggagtcccctgaatgtggctgtctttgggcagggctgatccttcactgcatagacccagacccagggccccagcgcagcagccacagcaggtctgtgggggatatggagacccggggcactggccaccgttgcttgaggtttttccatgctcagacttgttaaaggggtaaagctggacgatcctaagggtagtactgccccttttcttttggaccaggtaacctgggctcacagctggtggaatataaagaagaaatgtacatcacgtcagactgtggtcacacctggcggcaggtaagctggctgggaggtgcctggtaccccccaccccatccagccgggaccctcaggagacacttctgttctgtcatcccgtccattccagaggctctgtgggagaagctctgagccatgtctcccatcttgcagccaaagtggctggagccagggctcactttagcagatgtgcatctgctgggtttgaaaagcaagtccaggcagatggctcggaccacccagctgctcttcccatggccactgatagggagtgacagatgcaagaaacgtctccacacagttggacgtgtcactgcgaacatctgagaaacggggataaatgccagggaacagcacagggaggaggtcccagccagggagccacatggtgcttctgagccttgacttgggctcttttgggagcccagagagaggccaggagggggctacgggggactccgggttcctggcaggggctgtggacacagcagtgaaagagaatatggggggaggagcaggttgtgggggtcattgtgagtctgggttggggtgtctgggggctatcccagggcccgagaagagaaaggaagtgaggagcggagaggaagtgcacacttacgcaggatgcggccactcccaccagcacaggatggcctgggcagggtccctctgtgctccatgcagccccacgtggagctcagattcgcagaccagaggcaatggtgctgatggccctcagggtgtggagaaagcgaggctgagggagggatgccagtcggtaccacgtgtcctgcgtggtccaggcagctctaggatccacgcctgggctccccaccccaggagggggcaccgcctcactgtacactggctgtttctttccagggggcggggaacatggtctttctggctgaagctggcctgccaacctcatggagtggcagtgtctgctttatatactggggaaatgaatcaaacttacatatggctatctccttccagacaagacgttctgtttgaggtcagtgttttacacgcccgagtaccccagccacggcccccctcccacacagcaatgctctgggcacacgtgttgatcccaaagtgcaggcttcacctgcagcctgggttgaaggccttgacgttttttaaaaatatgcaagaaacatagaactttcaaaagggcaaaggcgatttattgtattttaatatttctatttcactaaaactagtgaaacatgtttgaagcttcttaaaggtcacatctgtccatttattagagaagattcccccgtattagattcaatagacagggtgaaatagaaggtgttctgattttatagaaacggattgcaagatagtcatagcagtcgcttttgccgaggaatttgcttagatttcaaacttgggaatatcagaattaaatgggagagcatctgggaaagtgctgagccgaggcctggccagggcagtgcttggtgcttcccgaaagatggcgcagtgcaggaaggagaggggcttgcctggctggcggtacaggacaggcgcccaaggggcaggcctgtgcgtgtggcaggggagggagagatgctcctgtgggtttttttttaagtttcttggggtgggctgaggaggaaggatgtccaggcaggggcagagtgggacagaggcagggagggcagggtggtgagcccaggacggtctccgtggcttcctatcgtgcccaggttgccagggatgcagtgagatgcgtctgagagagaactcagaatacgaatgtggaatgccagagtgcatctggtttaatcgacataacctttcaaaaacatgagtttcctaggatgttttgtttaaagccagaaaacattacagagcccctggctgaaactcagtgtgtgggggaggcaggaaaagggtgaagtggggacaggctctctgctctccccacccggccctgctgcttgctcaaggcgcaggaaaccacaggaatgggcgtctgaagagcctgcagcctgccagtggggtttggaaaaccctggagccaccttttcccagagccccaagctaatgagagcagacgtcattcccaggatggccaggaggcactccattcgtctcctcctgggtggatgcagcatcgccctcctgcccacgcttggagaggagggtggctggggcaggcgtccaggtgtcccagtgcagagccctggtgtgcaccggctcagggggccagctcagtaccaaagggaaattgcactccaggactgttgggctctgggaagcccactctcctctcactgcaccacaccctgctgttcagcagccccatctctctcgggggacccccaaagcagtcgtttaggctcctggtggagccagggaagggggctgcagccacgccctcaaagggtggggaatcatgctcgggcatggcaggtgggcttatccacgaggcccctctcctccagcctcacaggacccagcgtggtctccgccacccgcctggccatgcacgcgttccactgctgtcctggtgagggagactcgcttctcctcagatgttccccgagacagagagctcactccttcctggaggggagccctttgcttgggaattcattttcctcctaaatcattgtgggagcctctaacgagcccctgcccctcttgtccgtctctcccagcatccgaggaatcttctgaaagggaatgtgctcttgtgactccccaatcaagccttaggtgtcacaccggcctccaagctgctcatctgtcccggggcctctccgtgtgcccccagggctcccgccccagccacgtgcttcctgctccctggacacagctgccctcctgccctccaggcctttgcccctctgtctccagcctgtgatgcccttgtgcctccgaaggtttccccaagttccacttgccctgtgaacccctccctgggctgcccgctgactcaaatctggactttccctaaaacaaaatgtcatttgtccacaaaacattggctgagcccctcgtcctgtggcagggcctgaaactgggctcgagggtaaagatgacagggccccctctctttgctggtacccagtgggcaagtcactgtcactgtgcagggatgatctgcctccttgggggtctctccctaggctatgaatctgtaggggccaggcctgcatctatgctggcatccccaacagagaggacccagaccaatgggtctgtcggatgggtagatcaatggggaggagaactgtggaacgttcttcttcatagtcccctaaaatctgtgcctgtgacaccctaaagcctacaggccatcagctcccttgtccaggaaacaatttctatgaatgtagccataggcattgtgcttctccaagcactttcctgagctagcattaggacagaggatcccggcatgacaactcccctgcccccgctccacccccgggggcagacagggccgtgaacctcggagggagcacagagcattgggggacatctggggagcccccaggttaactctgaatccccactccagcctgcgaccccaccacccacaagagtgtgtctccacctgtgtgggggcaagatgtccacagacagagtccccgtggaaggggcaggggttggtgtctggcagtcaccagctgtgtggcttcaggcaagtcactgtgtctctgagcctcagtgtctctggaaagtggggaaataacctgtgagcctggctgctcttcagtgagatcctgtgtgcagcacgcctcacggcacaaggtgcctgcctggatcctgcaagtccctgatgggcagcagcacccccaccagggaggggcttaatccttcttggccctggtggcaccacccctctgtgtcatttggcatcacctgacagacccccactctaaacaggaaggagaaaggaggaagggagggagaggggaagagggagagaagggggaagggagggagagagagaaaaaaggagagaggagggagggaagaagagggagggagggagacgggaagagggagggaaggttttgggacatagctgctcaccctccatcatttttcataaggatcctctcttctttatccaaggtaaaagtgcttcctggagaattcctaagagcagtgggaaatggcagccgactgtgataaccaggaggaaacgcctggggaagggctttgcagggagggcaacggcacatgcagagagcctgggtgtattcagggaaaggaagcaaggtcaaggtgggcaggggcccctccttcggggccctgaggccgtggtaggatttgggcttgactgtaagtgtcacggaagcattggaaagttctggtggggttgaggagcatgggggtcagggtacctgctggacaccagggccaagggtgtggcctgccggcccccacccaggtctgctggggttcatgttcttgcagtgtggattctcagtccatgtcctccccagggccttctgctggctcctggaaaacccagcattcagactctgagggagactccatatggaggggcagagggaagacgggcgcagatgcttctctttccagcgtccccatgattgttccccagctgcccttgaatgtccccctggagcctggggtacccccagcccagccccctgggcacagtgcacatgaggccccgttaggctctgcacctgctaggaaggggtcagccgagcctccttccttatcccgccccacatggcacgaagttgctgcatgcttgttcctggaagctctgcacagctgtgccttcccgggaggcccaggagcccagctcatgtggacttgtccacggtccccaagggctcgctgagtctctgagcacactgagacggatgagcgtgctggccctagtggggtctgcctggggtggctgtcctctgtcccctcctgggctttcctgtgtcctgctgtgggccacaggcctgggagacagatgggcaagggtgggagggcaaagggggccactttcgaggaggggcggtatggggcgagggcgatgtgttggagatggctgtgcccttactgggcatgttgagacatgcgctggccgcccacacatgcatgttcactggagatttggggcaggccccttgtgtcctggtgtgactttggagccaccaccggctctgccaccttccagctgtgaggccttagcataccctccacccctcagagcctcagcctcctcatgtgtacaatgggaccccatcctggggctgtttgccaagcgaggccaccctcagtgtcccctcccgggtgagccctgtccaggccaccctcagtatccactcctgggtaagccctgtccaggctactcagccttttgtcccttggggatctggtggtcggccattcattcacttgttcactgattcattccacacatactccctggcaccaaggtctgagctgagctctgtggggcacagaaggctcacaagtggccctgtctttgaggagctttggactgaagagacaatgacagatgagcatagtaagtgttgggccaggggcttggagcccagaggccactccccactcagtctggcatcagggagggcttcctggaggaaatggcacttgagctgagtcttcatgtcaaattggggtttgctttgactgaggctgtgtatcgtaaatatttttctgtttctttctcatcttcatgttgctggcactctttgtgcctgggttttcacatagagagggctgcgtgctgtgctcatttgcagtttccttgttcaggtcgatagggtagaagttgctgtccgccattcagtcatccagggtgcgctgagtccgcgtgggctgggaaagctcggggatggcccgggacatgcagggaaccctcagaccggccttggcctctgccaacaacccccggctgcacattgacaaccctcctcccaggagccgctcagcctggaacaacctccgaccttctcaggccctgccctcagccacaccactctcctctgcaggtgtttgaggaagagcatcacatcctgtacctggaccacggcggcgtgatcgtggccatcaaagacacctccatccctttgaagatcctcaagtaatggcgtctgctagccccggggcagggagggcaggctggggctctttctttccacctgggaaccctctcagactagtccccagaatgtcctcccctcggggacacatgatcacagagcaactgcactaaatcctaaagaccggggctgggacacacctcacaaacctttcctgaggggtcgtggagatggacttcgtcttgccatcgggagacaggcacagagggaggccccaccccagcctggggagcagggagggccttccccgaggaggtgaggaattagtaaagtgcagggattgggaccaggtgacccagacaaggaagccagcagcatatgcccaggtgagagggttggcagctgaaggccgtcgtggggaagggagggcaggcgtgaactcgggacccagaaggcacagccggagcagctgccaggaagccagtatcactgtagtctgaaaaagagattactcaactgccagatggtggcactacaataccggccctaccacgggcctggcaacgcctaggccaagctcaggccatgggtgtggccattcaggggaggcaaagtgtctgtgtggttcccagaaaacacccccagggcagtacaatgcagataagcagatgtaacataagcagatgtgatatgagcagatgtgacataagcagatgtggtatcacctgcactggcaaggttggctagtgcagcctccgcccctccagctggacccgccgggcagagtcccagacacagggagctttccagcccaccccagagatgctgacgatcttctcctggcaggttcagtgtggacgagggcctcacctggagcacgcacaacttcaccagcacctcggtgtttgtggacgggctgctgagtgagccaggggacgagacgctggtcatgacgtgagtgcggggaccggggagtgggcactggtggcagggcagagccatgctgggcctccctgggcctactgtgtccttcaccccccagccacctgggaatcagggacatctgccacctgccccaggtccccttgctggtgaggacaggaccgaggctccaggccggctccaccatggccacggcacctcttgagccggtgattatatcatgagtattgctatctactggcacctttctcagccatatggcatgaaggtcatatggcttagggcctgacacccagacagatcatcatagggcagagctggctgtgaccctctcgtcacccatcccggggtctgaggctgcagcactggccctgcccggcttccttctgctcagccccagcttgggccaaaaaaggcaccatgaggggcaaaggggcctcaggagcctctgtcgttcagagcctctctggcccaggagcagagacgcttaggacagtggggacatgcggcgttcgactgcaccgctgcggccgcaatgggagacagccgtgcccagaaaccagtgaagtgaaggttcctctgggtgccctcgaacatgggcccctgtgagcccagctgattcacaggctgggcgaggcctgtgtgtctaacggctcctgcgaccccgcgctgtggcacggtgaggccaccgtgtcctcttcctgcctttcacggtgatgcctgagatatctgaatagtgtgtcccaaattcctgtttcccggaaccatgaatgggaccttatttggaaatggggttattgtcaatgtaattaagccaagatgaggccatggagtagggcggaccctgatccaatgactgtgtccttacaagaggacacagagacacaggccttgggggaggaggccggggagggaggaggcatggagtggagctgtgcagctgcaagcccaggaacacccagggcccccaggagctggaaggggcaggaagcctccgcctctagagcctctagagggagctcagccctgccgacccctggatttcagccttctggcctccagagcgctgagagagcatgtgagcaatgcttcagggtgggagagcatgtgtgtgatgactgaagccagcagagttcatggtaatttgccacagtagccccacgaggctgccgcgacagcccacagctcttccacctcaaggcctaggcacagggagattggacacctggactttgaacaccttgtcctctgctctgtcccttctagagcaggcaggacctgccctacccatttcccacagaagagctgggcactgtgcccctcaccctcgcccactcggctggagtggccatgtgctctgtggcaggtgtggatctatggactgggactacactctggctgggttcagcaggaagtgctggcctggctcattcaccagttcacaccctgagttttcccttccagctggcaatgggccttcacaccctcgaccctgagtggctcttccactggcccctgaatgccccagaggggcccacgtggataagccgcccaagagtgcctgaccccagcctctatctccctccatgtgccccaccctccccagcaggcgcacagctcccaggaggccacgggaggacagctccaggctgtggggagcaggcctggttttggaaagaaactgcccagctgggacaatgctgcccatcctgcccaggctggcctctgcctggacagggatgaggctgggctctgtctgggcagggatgaggctgggctccgcctgggcagggatgaggctgggctctgcctggacagagatgaggctgggctctgtctgggcagggatgaggctgggctccgcctggacagagaagaggctgggctccgtctgggcagggatgaggctgggctccgtctgggcagggatgaggctgggctccgtctgggcagggatgaggctgcgctccgcctgggcagggatgaggctgggctccgcctgggcagggatgaggctgggctccgtctgggcagggatgaggctgggctccgtctgggcagggatgaggctgggctccgtctgggcagggatgaggctgggctctgtctgggcagggatgaggctgggctctgcctggacagagatgaggctgggctctgtctgggcagggatgaggctgggcagggatgaggctgggctctgcctggacagagatgaggctgggctccgcctgggcagggatgaggctgggctctgtctgggcagggatgaggctgggctctgcctggacagacatgaggctgggctctgtctgggcagggatgaggctgggcagggatgaggctggcctctgcctggacagggatgaggctgggctctgcctgggcagggatgaggctgggctcctcctgggcagggatgaggctgggctctgcctggacagagatgaggctgggctctgcctgggcagggatgaggctgggctctgcctggacagagatgaggctgggctctgtctgggcagggatgaggctgggctctgtctgggcagggatgaggctggactctgcagggctagagtatgtcccctcgtttgttggggaggttgggcagacgcaacccctgagctcccctggctgctgtggctgggagacaccaccactgacccctgctgctttcctgctcaccacccgtcacccccacccaccctcaaccagctctgctgcttgacaattaaagaaactgaggctctgagaggggaggtaccttgagcaaaacctgtggccaagtccagcccatgtgggcactccagggcagctctgtgggcagcagcctgtcctctccgggccgagcagaggtgggaccccctatgaggatgctcttctgctctgccatcatccaatgcacgtttattgagcacctattatgtgccaggtgctgtttgaggtgccaggagtgttggcaacacagcacactcagccctggctttagggacctctgatcatggagaacgggaacttgtcctcacactcagaggacacctagtctgcctcccagctcctggccaaggaggatggaagctggacgtcggatttagcaacaagaagccatcagttccagctgagccagggtgggaaaccaggtttcgggaaactgagattgcgtggggcacaaggacagggaagaagtggtgagtgtggacccctctcagggtatttaagatgagcgggtcagcaacagcgcgaattcctgccgccttcaattcagtcccagcccagaagggccttccctgccaccaggcctgggctgcctggccctcaccccttcgaggatctgatcccatctgcagggttgcccttgctggtggctgtgccctgccccaggctccaggagggactggttctgctggcttcactggtgcgtccccaggccacgcacagcaccaggcatggaagaggcgcttgatgctcagtgaatgtggcttgaataaatgggtggtgatgcacctgtgaggatgacacaggggtggagacagacgctcatggggatgagcttgtgcaagcaccgcctgcaggggcctggctggggagaggtgagctgggcccatcacccccaggaccagggcccagccagcacagctcacacagctccgcccccgtctccaaatcaggatgcttctcgccaggctggtgtccctggacagtggactgcacacgctgcaccttggtttccacagccccgaaactgggaaatgagtcggcttgaggagctgtcaggaggattccgggaagcagaacgtctgtgcccaggaaatgacatttcccttccagagacctgggcttccttgtctgtagcatggggacttaaactccacgaggtcgccgcaaatgagccctcaactgatgctcacctgtgatgcttggggccttcttgcttcctgggtgatgagcaagaaatcacctgcttagactctgattctagtatagaggcctggcttccgcccactccacagcagacagacaggtcccggctggccttcccaggccatgcattgtggtgggattgaggggatgcttgggacagctctgcttcccagctggggtcccgggtgggtgggagcgttattcccaagaaggcgagggcccccttcactggtctcactgaacatccagtacccgccacgggtgggtcccgctggccggccgacctttgatcctgtatccgtgtgttctcgatggcatgcgatggtgcttctgggtggtcttgtccttcagcgccccgggagaacagtgagccccttcccctcccacagtctggggggcgtcttccccttcctggaccctctgccccaagtcctccctccgtctttaccaatatggcctcctgcgacaggggctgcaacgcagctttagtgagcgccccactgcatactacgggctgttttcatacgtgacttcaggccattctcataagaaatgtagacagattgatttattcctccgtttttagaggtgccaacacgtctcaaagaattcatccctgagggagtggtgggaggatggggaccctgggagcctgtcctgtaaaaattgggtggggataatcacccttcctgttctttaagggtcctgatgtttgccgttttccctgaacagttaattcctgctctggccaggccctggatgcataaaatccttcatgacttttgcccagtctcgtgcccccggaggccgtggtctgggacagaatgggatggtcctgccttttcctgcagctgcaggacctcctgtggcctttacggggatggggagtgagggaggaagggagtcccgccaccaggcactctgcctgcactctgtttgtgttgtgggcctttcatgtggtcaagccgttcctgaggccagaacccgcagagccgcggggggccagcagtgcaggggtgagggcggcccttactcctcacacagaggttgacagccttctccgggcctcagcttacctggccaagagatgggagtgctgtccatccgggagccgtgaatgagcctgtctctgcagggtgccaagcccttcgccccggctgtcatgaggtctgagccttggttaggccccagagatgacccagccttcatcccccacccacaggtgaggcattttatcccagaaggataatggccgaattcacagccaggtgctataaccttttaagttatttttcaagcaacagaacagttcctccagaccccctggttcacagtgctgcatcttcagacagcttcccagtcccagtgacatacaaataactcaaactgcaggagagggaacacgctggcaggtcagactcaaagtccctctgcaggggtctgtacgggagctgccctgccggagagttcccacagccacaggctcagctttcggccactctgtccttcccggataactgtttggtacaaatctgcccaaaggccacctctaacctggccagaggcaacttttgggacactttcctggcaccagtcactttcacctgcctctctttccccacagtgcagcctcagagcagggaggggtccccaggccctgggcttgggcgagaggtggagtggaggctcccagagccttccctggctacatggttcacccctcgcagcgtggcccattttttcctcgttacctgcaaagtaatatctagaccccttcggcacctctttcctaagacccagaattaactagatggcagctctttctcatggtatcagctgagggttgaggtttcataaaaggcagggcttcagggacatgcagggggttaattagtcaaccaaaccagcctctctgctctgccccagctcagaacagcggtgagactgaggcctcctgggggtctctgcgaccaatggagccccagtgtcatgtttctgtacccgccatgtttctgcgcaaagcctcacagctccagagccaccagcccgggttccaacgccgcccctccaggaggtggcctgaagctgtgctgccctggccgggtcccttgcctcagcctcagtttccttgtctgtaaaagggggcttggcaaggaggaaatgggggaatacaaggtcacgcctgggcccggcctgcagtgggtgctccgtatgcaccagtggctgttgctgctgctataccttccataatgccacaggccacaggagagtgtgaggatgctctcagggatccagaagtttcccctaaaaaatcatttcttaagtgagagaagaccctcagatgctgtttaagagaccaatgccccaggcattgtttggacagcgatgttgaaggaagatcccagtgtgttgagttggggctctccaatgttgaggccgtccaagtggggtccatctggagacagatggcaccctcatcccaatcacgggtgccctggagccaagaccactcacagccggggccaccgtgcaggcccacaagattcctctgttggaaacagtgtctgcagaagcggacggacgcggcagagtcacagccgtacctgggggccttcccctgtccttggtgggtgttgccactagcagctaggagggctcccaggccgagggctcaagccccatttccccactcctctgagaaagaatggtctggggctcctgaaccccacgcacagagaagaaagcagatgggactgtgagcccagaaccaggggcctggctggaatgaggcctggcagcgacgtggcaggaatgcgggatggaaccagcctggctgctccctcgacgagctggccttagggagcacagggaggcagggtccctggggggaaggtccagctaagacagagggaggccccatgctcagcttgcagaggcttagggtttcatcaaacaaagacaatagtgtctgcctcttgggactgttctggagagtggaggcaaatgcgaggtcacagatgtaattcaagcatggaccgccgcaggcttgcctggctgagaggtgccccgtggagccaaatcttcaaatatcagcctcagatgctcagacccagctgtcatgtctcagaaataccctacaaaacctctttcaacacctccctagaatggggttgtcctttcagctcatcatgggccaccccaagtatccatccccagttgggggtgctcagacagggaccagactggagcagcgtgcatcacctccccgacccagatgcttggcctctggtaatatggccggagcaccacaagctggactggagaaggcccagggaagagcaggctgggcccaccttctgggtggtctttggagcctaagtgtgtggtactgagggatggagtggaaggcactcaggcagcagccctcccagagagggagaaagcgaggcacctgagtgccattctgagtgatgggcacacagcaatgactgctgactgcaaggagggagaaggaacagcacaaacaagctgtgtgaccttgggcaagttactcaacctctctgtgcctcggctttccattctgtaaaacgggcggacccggcctaccaggctgtgcatgcatagcttccagcacccatggatgccgcagggtgcctccccacctccaagaagtcttcagggaatccccagcacctttagatgtccaggcctcctgtgggcttttctagacccttctcggtcatggagctacctgggctgagggtcctcagccacactcagggagtgtggggccacaggctctaccccagcccatggagtccagtgtgcttggggttcaggatgttcagatcttaggaaggtaacacaggcctgtaccatacatgacaccctaagtggccagcctccctattctgtcttccgcctcttcccccacccacctaggctgcgacgggccaaccttgctcatcctgtgggctctgcgctgagcctgctgacttgttatttctctttgaatcgccacctctactagggagcaaatgccctgtggcccagcgatagaaagctgggtttctgcagcacggaaccctcacacggtcaggctgggagaaagccagggagaagccagacagctgcagatgcagccacctgaccacagatcattccgcaaaacaatgcaaggaccactgtgggggccgtggaagggctcccaactctgctgtggatctgggcctccttccctgtccatcaagcggggccactgggggccaaccagagcgactcacgcagtgcaattgacaagtcatagatcacaggtggtagttgtgggaatattcacgccgaagcctacagagcacgtgtgcagggccaggctcggtgaccggggcagcctcgctctgatctccagcaagggcaggagaaggatatctgtgcccatggtacaggtaggaacagagtccagaggggacatgatttgcacagtaggacaaggcctaatgaaggtggttttctctcccttccctcctcttcccaccccagggtctttggccacatcagcttccgctccgattgggagctggtcaaggtggacttccggccctcattctccaggcagtgcggcgaggaggactacagctcctgggagctctccaacctgcaggtgggccggcatgaggctgggatcgggcaggtggggtacagactgcaaacacaggcccactctgcctgccaaagtcctcccctgcaaggccgcagggcacctccccgcctccaagaagtcttcagggaatccccagcgccttgagatgtccaggcctcctgtgggcttttccagacccttctcggtcatggagctacctgggctgagggtcctcagccacactcggggagtgtggggctacaggggctacagtctctactccagcccatggagtccagtatgcttggggttcaggatgttcagatcttaggaaggtaacacaggcctgtaccatacatgacattggggtctgggtgtggagtggggtctggggcaagcccacactgtaattgagacacataactgtttctacagcaaatgtgtaatatggacactaagaggagtataaagaccatcagtggcccatctgtagttccaatcaggctgtgctgctggcagtgtggtggggaagcctgggatttcagagtgtgggggcctggaactgctcgggggtgggtggccctgttgaagaaatgatttaatggtacttgttaaagcgcggggtggaagactttactcaagaccatcacggtgggtacagggaccctctcaaaggagagattgggctcaacttgaattcagcatgggcaaatgggagttcaaagccaaggtcagtgggtggaaactgactaagaggaaacaccaggcatcagagaatttgacatcacctggggggcagtgggggatgaggaagcctatcggatagggagggcgatcggatatcaagggtgggcggtgcctgccaaactgccttagcagggtgcattgcttaagctggatttcacaaggaagtgctcagatgggcctaggaggaggtttaggagcttgaatacaggccaccgggcatcctcactggccccacccctgtcactgccacagcagctgttgcagggagatgggggtaggcctgtcttgtcctgattgtcccctgaggacccactgtgtgcctgtgagccctcgagggcgtggctcagcccagctcccacacagcagctgaggggacgaggggaacctcaaaagggctgcacttccagcagctctgcgacccctcgggcccagccagggctgcacacaggaggggctcagtgaatgcccatgggttgggatgagagggaggcttccccaacttgactgcagacatgtcacgccccattatgggcctcagtttccccatctgtaacctgagccatcagccatcttcaggctctggcagcctcagcggcacaaggccttgtagagcagttgccctgtctcaggcagctccttaccctgatgttcctgctgcagggcgaccgctgtatcatgggccagcagagaagtttccggaaaagaaagtccacgtcctggtgcatcaaggggaggagcttcacgtcggcgctcacgtcccgcgtgtgcgagtgccgggactcggacttcctgtggtgagcgacgggctcctggccacgaggcctcaggcgctgcttgagcatcctcacagcatggcggccacttccctcagagtgagggaggaagcctcagcgccttttataacctggtgtcacagtcgcacactgccacttctgcctcattccatctgttagaaccaagtcaccaagaccagcccacactccaggaaggagctttaaggaatttgtgggtgcatttttaaaccttctcagtggctgctcacaggcaggaggagaaagtgaggaacaggtcagggcatcttggggacgtgctgcacccaccccagcccttctccatccagggactctgctgaaagccacccgacctgtcccctgctattctcaaaagctgcctgtgactgcccagtgcccacaggacaatttggctaacagctcacccacctgccacctcacccctcctcatcatgccccctggcattgcagcctcctccacctgtactggtgctgctcaggctgggccctgccagcagtgcctctccctctctttccctacctgtctctgtccatcctttgagatttgctcacctcctccaggcagccctccaggtttctctgagttcacagcatccctttgcctcccttgttaccctgtgtgcccatctgggatggggctgtgggtgttccttgatgtcctcacagatgggtgcatagcaggcccttgacatgaggttcccttctcagctcccccagatttcaccccaaccctgggtgactccggttcccacctgtgcccgtcacttaccactactcttccctcctcccagcgactacggatttgagcgctcctcctcctcagagtccagcaccaacaagtgctctgccaacttctggtttaacccattgtccccgcctgacgactgtgccctgggccagacctacaccagcagccttgggtgagtgtgggtgcgggcctctccctgcctaaatccgggggcagagctgtggtgcagccccgaaaccacgccttcctggctggtgcctgcagctcccaactcccaagtggagtcggggaaagagaggtcaaagttgaggatgccccacgctcacagcacagagcctggctgcggtgctcatatgagtcaccagacatcatgagtgaatgaccttagctcccaggccaaaggaacccacagggttctcccatctgagcccacatgggccagtgccaggagaaagctgccttgagttggctctggacagagaacaatagacagaaaaggtccaaggtgcccatggctcacacctgctgcagcacgtcttcccctggtctttctgagcctctgcagtgctaggacccttctccatttaccggtgcccagtaagccaggctctccccattcaccaaggcttgggtgctggaggtgctcctgctgcctgcaggtctcagcttaaatggcacttcctccaggaagccttccctgaccacccactcctgaccccgagcctgcctctgtcacagcacaaatcccagttattgtcatcactcacctaattgtcctccttgctgaactgtaagctccacaacacacagtaggtgttccttcagtctgtggtttgctgaatacaagctgtgcatgaggggaaggcatcaccaagtgcaagcagttacgatgcttttcctccaccagaggctggacatactgctatgaaggattcaattcatgtaaaatgttaggtacataaaagctgtgagccttcagctttaggaggtcccaaacgtgctccgtcagaaagtcccaatttcctcatttctctttgaggacatttttcagagaggaagagaaaagcccttgggcttgttagaaaatccccattacttcccctgagggaacttgaggaaacaggaggcaggaccagaaattgcaggctttggcctcaccagcatgtctcctgccatccacccacccatccatgcaatcactcgttcatctcccatctacccatttatccacccatcatccagttagccatcatctgttcatttctccatccattcattcatccatacgtctttccattcatccttccattctcccaggcattcaactactatccatgcatccatctatccattcagttacccatccatccattcatctatccatccaccatccatctattcattcaccatccatcaatctatccatccattcacctatccatctatctacccatcaattcatccactatccacccacccatctgtccatccatccatctacccatccatctatccatccaccatctatctattcattcattcaccgtccatccatccatccatccatctacttatctacccatctgtctacccatgcacctatgtatcatgaagctgcagtggttgcacatccacctgggcttgacaacagggactcttgtctgaagtgtcagagccaggatcttgatcaagacaaaggatttcatctcataccatctgcacgctgtaggtgccatgggtgggtggcccttagagaagggtattttctttcaaagcactaatgaaatgggcctgtgcatgatcaacttctgaatgcttattcagtggcagagccatctgggagaatttggccctgagggcaagaggggggatcagccttggggagacaggtacccccagcaccttggcagcaatgccactttcacagacgcatagtgtagcctgagggagcttcacaagtagcaagctggatgaggccaccccttttagggatctcctaaaaggttgcccagggcctctctccagcctcgtgccacacccgctcctcctccaggctcagacccaccctagggcctttgcacatgttgttcccatggcctgggatgctctttcttctcctgctcatcctcccattctcgctgaaagcccctttgtcagggtccaggtccccagggatgccccagccagcgccatcacagctgtggtttcactctgacgtgatctgctcaggtccgcctctgcctctccactagagggtctgctctgcacagcatctaggggctgcatgcgatcacccccattcccactacctggcccataatagatgctcagtaaataggtttctcatgaacgcagtgattagtcacgaatcgcccaatccagttctctcaagggaacagggagacggagcccaggaggaggggtgtgtgtgcccatggttacggccacactgtgagccagtggcgaggtggaggcaggaccccaggccctcttgggcactctgtcctccacctttctcagcaagaccgtgaaattgaaactggctgcttaaacagcccctctgcagcactaacggtggctgttactgttactgtgagtaatatgatcagaccacggagatgccagcgcctccgaagcacatcctgccaccatcagtccttcttcctctgagcctcagtgttctcatctctaaaatggggctgtaacagcaatcaggtggagtcaggaggtgactgggagttagcaagtagagtcctaggggtgggaagccaagtgccacctctgggtggcaagcacgtccctccccagactatggggccccatcccttgccacctgtctgaagcggaccctgaccctctcttgtcaatccaggtaccggaaagtggtgtccaacgtgtgtgagggtggggtggacatgcagcagagtcaggtgcagctgcagtgccccctcacgccgccccggggcctgcaggtcagcattcaaggcgaggcggtggccgtgcggcctggagaggacgtcctgtttgtggtgcggcaggagcaggtgagtgagcacctcccagcaggctcctgggactgtcgggcaggggcggctccaactgggcacgcagaaggcacggtgagggtgtctcctccacctagaagtggctcagggcatcgtcatcagccagcctgtccagactgaaggaggcagcagggggctggaaatccgcttcccgagtcgagaccagcatttaacaatgaaagagacatgaaggagaatagagtaggacgtagggggtattagggtccccgcagagcagaaggagacgtggtttcacacatcgggtgggggagggtgtagttactggccttggtataaaatgtattcattcccgtgggtggtaatacatttttaaagcctgtaattatattgatttagttaatttgggatcttatgaaaaacagaaagttaaaaacgctattacttataattacacaaccaaaaataaatcctgtgtgtgcatggacagatacagatataaatactcacacaaacacagatagaaatttcctcccagcctcccaggcttgctttttttgctttagaacaagtgttatattttcttctgacgttaaaaataatgaatgttcattgtagaacatttggaaaacacacacaaaatatcaagagtataaatatgtctcaaaaagccccccagtcctccgtggtaacaactgttagttttttgtatttccttctagtccttttaaattaatttgtaacatgcttatttttctgattgttgaataaactaatgctcattgtagcaaattcaaaaacaaaacctagaaaaacttacaagcattgcagaaaattcgagatgacagaaaagggcaaaagagggttcgatgcatccgtgtcgcacccggagggtgagcgcctaggaccctgggctctctcccggcacgcagctttcctggacacttggctctccggtgaacagtacgggagatgcagctagtgcggcttcacagtgatgtgtgtcctgtttaaatgtccttcaaaatacggtgccaaggtggggtgggatgttggtgacaaaggtctttggagttggaaagcagggagcctggtctaaggcaaacatggaaactgaggcccaagacgacgcagagcagtgcttgcccagcgcctccgtggcgggcgctgtgcacgagccactgcctgtactcctggccccacctcaagtggcgtcctcttgccaacctgctttatagctggggaaactgaggctcggacagagaagtcactctcccaaggccacacgggaatgagtggcagggctggcgttggggtccctggcccctagactctacgtggacagagactgagtctggggcccctagacctgagccgttccctggtgcaggctgctgacggagatggggcctaggacccacactcctcggagccaggggcagccctggggcgcctctgttcgcagcagcatcttggggcggcaggaggacagagccgctgccccgcctgtcccgcttggaccctcagagtagaccccgctgcggctgcccgtccggggccgacttccaggaaaaaaatggccctctgctgccccctagagcctggcgtctcggcagtgcagtcgcatctgcggagtgtctctatgggagccagtctaccaccgcccagggggccgggacccttgctgggcctgctctgctggcaggagctggagttggcggaagtgaagagagtgatcaaaagatgctcttggtggggagagtcaacccccaccccactgtgcacctactgtcgggaagaggccacccgctacgctagggaagctggtgggagtgtaggatccaggtccgaggcacacactcactggtacacacgctcacacatacacacaaacacacagacacacacatgcttacacgctcatgtattcactctcaaactcgcagatttgtacacactcacacactgtctcacacacacaggccaacctatcttgcaaacagcactgggtttaggggagtctaagttttgtaaatatcttaagaattaaaaataaggtctgatagaggccccaggaataaacccatataaatatggccgagggatgtttgacgtcggtgccaaaacaactcactgaggggagggcttattcatgcaataaaaatgaacctcaacctaaacctcacacccgatagaaaaatgagctcaaaattgcctagatttaaatgtcgcatgtaaaaatcataaaccttttagaaaaaccacaggagagaatatctagggctaggagaggagtcctcagacttcacactgaaagccagtcaaaaggaaagttgataaattgggcttcatcaggatcagccactttcgctctgtgaaacacccatgttaagaagatgaaaggcaagctacagagtgagagaaagtatttgcaaaccacatatccaacaaggaccagtacctagactagaggaagaacactcaacagcaaggaaacaaaccgtccagttaggaaatgagcagaactgaaaagacgtttcaccaggagaatggacaaatgacaggtaagcacacgaaaagatgacaaacgccatcagccgccagggaagcccacagccagacatcactgcgcacctatcagaatggctgacattaaaaatagcgccagcatgaagtaccggtgaggatgcagggaaggacactggatcacttacgcatggctggggagactggagaatgccacaggtgttctggaaaacacttcagcagtttcttaacgaactcaacatgcaacgaccagaggactgagcacttgcactcatggcggtcatatcagagtaatgaagacttctgttcacacaaaaacctgtatgtgtctgttcatagcagtgttattcacaaaggccagaaactcaaaccgcccaggtgccctgcagtgggtgaatgcacaggctggggtgcccccatgctgagataccatgctgcagtgagaaggaatccattattaatacctgcagcagggcccagcacggtgtctcacgcctgtgatcccagcagtttgggaggccgaggtgggtggatcagctgaggtcgggagttcgagaccagcctggccaacatgacgaaaccctgtctctgctaaaaaaaacaaaacttagccaggtgtggtgatgcatgcctgtaatcccagctacttgggaggctgaggctcaagaatcacttgaacctgggagtcggaggttgcagtgagccaagatcccaccactgtactccagcctgggcaacagagtgagatcccgtcttaaaaaaaaaataatagtaatacctgcttcaacctggatgagcctcaagtggattatgccgagtgaaaaaagccactcccacatgatcccctgctgtgccactcattcatataacactcctgaaatacagaaatggagaaagagaatagaaattatcaaagttatagaaatggagaaagactaatggttaccatggagttgggctaatgtgcggaagtgggtgtgtctgcaaagggcacccggtggggtcctagtgctggctgaattgtcctgtctctttcctgtatcagtgttaacctcctagtcgtgatactatcatttggcaagatgttagccttggggagagccgggtacggggcacacagggtggatctgtatcattccgtacaactacataggagcctaccattatctcagaagacaatgtttaatttttctttaagcaccagtaataataatggatataaatgaaatataccaggatgtgaatggagggtattatggtgagatttagttttgttctttttctttgctttactatttgtattttatattattttctaccttgagaatatactacttttgtggtcaggagaaaaagacaagttattttaaccaactgaaatgtttaagaagttaaatgtgcatcagcgcagcccttgaaggcaggaacacaaggccccgagaggtggcgcctcacccaggttgagcggatcacgagtcctgactctgggtcacacatgccttctccttcccaggattagcacaggaaacacttccctccgtggaagcagctcagacttgagcgcttcccctcattccccgcccctccctgagaggctgcctttaaacagaaagaaccacaaccagcgagcagcctcctgggtcctgggctttggagagcctcagtcttctaacctgtcaaatggggagaacggagcaccctgcagcctccttcctagggaccccataacaaattatctcatgccgggtggcctgaacccacacaagtctccgaaggagaatccatttgcacctcctccagcttccagggctcccggcactccttggcccctgacagagtcactcctgcctttgccttcacctccacgcagcctctgtccgtgcccaaatctccctctcctttctcttacacagatgcctgtcactggatttagggcccaccctaatccagtatgacctcatcttagctaatgacacctgtaaagaccctatttccaaatgaggtcacattctgaggttcccggtagacgtgaattttggggagacactgaccagctcaatttaccacatctgtggagaaagttaagtgaacagaatttacgtaaaagttttctatcaacttacaacgtttggctggtataaactgagaagatggctaagtggttagtaatcacgctgtttcctccatcatcactaggaaacggtttcctcgtgcccctggtgccggcgagggaggaagagggaaggggaggagaggaggaagggagggagggagaatgtgatcatgagccataaatcgaagaagttcctgtttccttcactcaatcccccacctctgcgagggaaatgcggttattggaaggtggaaggagatggtggagcggcctctctgggtgactcggtgccacgcggggatggcagttggtgggagctcctctctgcactcaccctgccccatctcagcgtcactcctggtaccgcatggtctgagaaagagaaaattaagaaccgcagcttcccagaaaggaaaatcctgcttggtttccaggcaggcggcttaggcacttccagatgtgttcctctcccctgccgaaaccctcctcgcagtgggaggcccctcaccttcctggctccatccctagcacgggcctctgtgggtctcccccgggccctgactgccccccagctgctctctgatgacacccttgggcctctccctctccctctctgccgctgggtgattgttctgaaatatcccttggccacagcccctagttaaaccagctgccttggtcagccccatactccaggaagaatctccagggcagaaccaggcccggtctcctgtgggtccccagagcccactcatgtcaaggaagggagggcggcaatgaatgaatgagtgagtgagtgagtgagtgaatgaaccactctggcccctcagcttcaaggcccactcctgagtggccacatggtgtttctctgcagggtgatgtcctgactaccaagtaccaggtagaccttggggacggcttcaaggccatgtacgtgaaccttacactgaccggggagcccatccggcaccgctacgagagccccggcatctaccgcgtgtccgtcagggcagagaacacggcaggccacgatgaggcggtgctctttgtccaggtcaactgtaagtttattgcccctttgaggccaaaggtcactccctttgagagagagaacctggctttgggggaaacacagggaagcccccgggattgctctaggcccctggtactcaggacggtgaacccgagggcagggaggcagggaggctgggctcaaacccgcacccctgatgacccatacaatagtagggcagagctggtagctggtggtgatattgatgatagtggtggtgatggtggtggtggtggtggtggtggtgatggtcgtggtggtggtggtgatggtggtgatggtgatagcagtactggtggtggtggtgatggtactaatgatgattatagtggaggtggtagtgatgatggtgacgttggtgttggtgatggtgatgatggtggtggtggtggtggtgataatggtgacaatggtggtggtggtggtggtgatagggtgatggtgatgatggtaacagtagtggtagtaatggtgatgatggtggtgatagggtgttggtgatggtgatagtagtggtgggaatggatggtggtggtgataatggtgacaatggtggtggtgatggtggtggtgatggtgatggtggtgatggtggtggtggtgacaatggtggtggtgatggtggtgatagggtggtggtgatggtgatagtagtggtgggaatggatggtggtggtgatggtgatggtggtggtgttggtgatggtggtgatagtgctggtgaggatggtgatggtggtgatggtggaggtgatggtggtagttatggtgataatggtggtagtggtgatggtggtggtgttggtgatggtggtgatagtattggtgggaatggatggtggtagtagtggtgatggtggtggtgttggtgatgatggtggtgatggtgctggtgaggatggtgatggtggtgatggtggtggtgatggcagtgatgatggtggaggtgatggtggtagtggtgatggtggtggtagtggtgatggtggtggtgttggtgatggtggtgatagtattggtgggaatggatggtggtagtagtggtgatggtggtggtgttggtgatggtggtgatagtgttggtgggaatggatggtggtagtagtggtgatggtggtggtggtggtggtggtgatgatagtggtagtggtggtggtgatgatagcaatgaagttgctggtgacagtgatcactaagcagcctctgaaatgccccatgccctgatatcatctaaccctggcctttttgggtccccacagcccccctgcaggccctctacctggaggtggttcctgtcattggcctcaaccaggaggtgaacctcacagctgtgctgcttcccttgaaccctaacctcaccgtcttctactggtggatcggccacagcctgcaggtgcgctggctttgccccaactcagcccttcttcccgcaggctccccacaagctgcacagtggggcagagcatggccccaggttttcagcagaaggaaccagtgtagggtgcactcctcacccttgggcccctcctggggcagttgagaggggcacaccctccgtgggtgccttttcagggcccatctgctcaatggtgccagatgagtcagactagaccctgccttttcccgggaaagagatgggaacgcagtggattacctgagttgggggtggtagaagtcacagaggcaggtaggtgggctgcatgagagctcccggaaaggagagagcatttgcagtgagaggctcagggaaggctttacagaagaagaggtcaagggggctcagaagcctccctcagaggcctgggttgtaccctgtctgcagtggggagccacagatagttcttgagcaggagagagcccaaattagcagaatgcctggactgggggcaagacccagtgaagggcatcctccactcattcagcaaacagcccagcaccaccaggcaggaagccccctaccagcagctgacggccctgacacagagccccagcaaggggagggcctgtgggctctggattgtgtttctctagaatggggagggtctgagaaggagctcagggtctgggttcaggcctcggctccgccacttccagctgaatgctccacacatgtcccttcacctggcagagcctctgcctccacatccacacccatgggggtggcctctcctgtctctgcggcaacatggcgcccacccggctgagtgtgcaccatccccatggctgggtcctgagctgggcactggcttggtgccatggatgacagagccatggctcatccacagctgcggtggccatgtgtggagatgggagatcacatgggcagggagtgaaggcccagcccggcagccacatcaggcctcctaaatgcccgtggggggcaggcctggggagctgttgagaaggaagggggtgctgggacctcaagttcgtgctgtgttggcttacaaccaggtgcccatgagatcaggagtttgagaccaacctggctaacatggtgaaaccccgtctctactaaaaatacaaaaattagctgggcatgggggtgcatacatgtgtaggcccagctacatgggaggctgaggtgggagaatacttgaacccaggaggcagaggttgcagtgagccaagattgcgccactgcactccagcctgggcaacagaacaagactctgtctcaaaataaaataaaataaaataaagaaccggctgcccgccccatgcctccctgggtgctgccaccacaggatgtccataatgggcccatttgctgatgggaacaaggggacagcaatgctctcagtgaggcagcgaccataggccagcgtcccccacggccgctgcctcactcggccaggcccctaagccctgctgtgcccctgcagcccctcctttccctggataattctgtgacaacgcggttttcggacacgggcgacgtgcgtgtgacggtgcaggccgcctgtgggaactcggtgctgcaggactccagggtcctccgtgtgctgggtaagtacttcctggggtctggcagcacggcctctgcatctctgctgcagtccaggaagccaggccacatgggtcgcgtaagccatggatgtcctggtcaccctgagtggccctggggtggggagggaggggctggataaacagagccctgccctggctgtgtggcctgggcaaagtctcccggtctctctggcctcagtttccccatctgtaaaataaatactgacaaatcctgtgtcccaagacactcatgggacagaacacaccagggacaaggtcacccagcagcaagacagccaggtttgggcactggctgtgcctgcctccagggcccctgtcctcttggcacctctggccaagcctgagcattgtctcatgatggcagcttaaagaggactcctgtctagagaaacgctgagcctccttttctgaatctgcatcctcatttatctgtgctcactgggggctcttagtccctcgtgggagatatatacaataccaactggtcctaagactgaaggagaccccccccccccttgtcaaggaggcagagctcattgccaccaacatcacagcaataaaccctcattttgctttaagaacagcctctactgtggacagcagccatcagttaaatatttagttggacaagtgtgcggagggttgggctgcccacacaggcccttcacaccctggaggaggctgcccttggctattcttcattcattgttgggctgggagctttgcaaatgccatcaccaccctcattgtaagatgttgggtttgcagtcctcaaagcacttgtcccttgagcccgtcagccctgcacagcctcctcccactttacatgtgagaaaactgaggcctgagaagtggagaggttaaagtttatctctggagcccctggtgactttagaattgggctttgagccatggactatgggaaatgtgggagaaagagaagaagacagggcctctgctctcaagggactcttaatctggtgggaggaccagcaagttgaagtccatggatccctgatggatgagaggctgacctcatagggtgtgttcatgcttgtgagtcaaggaggcaaatctcacagagcaggcttggtgcacactaggcctccctcctgggtcagcgcatctttatcatcatcactggcatctttgtcactgctgttatgagatggcagccagtgacatgggtcctgcctgggacagaccaccactgctggcatccagggaaggagctggtttccaaacactaaatcaggactgctgtcggcctgcttgagaagacgatggggctgctgggccctgggatctgaatcaaaggcctcccgggaccatccagggcatgtggctgcccccgacccccaccctggagccgtcagagccaggctgtccagaactgaccagtctcccttctctgcgtctttccagatcaatttcaagtcatgcctctgcagttttccaaggagctggatgcctacaaccccaacacccctgagtggagggaagacgtgggcctggtggtcacccggctgctctccaaggtgtccacccagagcctagagcctccccagccccacggtgcttccggcatccagagaagcccaagggccccggggtgctcagggaaaggagaggcgggtggcactgcccccgcacacgatgctctggtcttcgggccagctggggatgttgaaagctatggatggggggcaggcacactgcccttatttaggaggacctgcagctggagcaccacctcacaggggagggaccacaggcaccctccatgcacacagtccagggaccacctgctgtttgcaggagaccccactgtcgtcctccagtgctccagagtctctttaaagcaattttccttcattcactgaacttctcttctgggctggacacaagacagagagaagaacccagtgtgctcactggcctcaggagctcccgggtggcagacatcagggcgggctgtagcacacccaaggcccttggcccccaagtgagagaggaccagtcctctggagccacctgaggctatcacaggctgaggcctactctgaccaggcttcccctcccgtgaataatgctggtaaaagggtcctgggcactgaaggttgaatcagggtttgccagatggaagtgcatggaacgggacttccaggaggcagaggcacctacatgagcagtgcctatgggctgagagcatattctctgtgggtgtatggccctggctgggcctggggtgttagggagtgggaagggggaggcagctggagtcagtggggcccggtcacagacctggaatggtgtggtaaggagccttgtgatggaggacattagccagggaggaaggtgctggtgctcactctagtcatggtctgaagaatggactgagggccaggcctggccaaggggaggccagtgtgacggcacaggtcctgaatagcagggctgagggccctgggtagctgggtgcagggggtagctcagggtaccctgggaccctggaaggatccccacgccatgcaggggtcaggaacggcctgtgagacaggtgtacaggccaagaagggagagagggtgttcctgggggccccagtatgaggcagggaatgaggaagacaggcggaccaaagtggcttaactctccccgcaggagaccagcgtccctcaggagcttctggtgactgtggtgaagccggggctgcccactttggccgatctgtacgtgctcctgccccctcccaggcccacaaggaagaggagcctctcgagtgataaggtatgtcctgtggccgctgcactcccaggtcctccctgcacatcccagggctcgggtcatttacaacaagcagggacgtctcagtggctcatggcataaaggcgtctttctcgctgcatctcagtctgactcagggtggcttgacctcgtccacctgtggctacgccctctggaagtcacacagcctctaaggtcactgcggcagaggtagtcggggggagggcacaggctggaccacctcccagggggctcgctcatttcttctcccgtgtcattggctggagatggtcacatggccccaacctgactgccaggagcactgggaaatgaggctaagcactgtcagggagacacccaagggtgtgggtttcggggccgagcagaagtcagcccccatgcagttagcaaatgtctttattgcacaggacaacttctaagtaatagccctcatggaggggataaaagacctgccatgtgacaggtgtgggaaggggactcaaagatgaaccagaatcccttcacacccactagggtggctaacattaaaaatcagacaattccaagtgttgccaaggaagcagagaacttggaacctctcacactgctggtggaaagggttcagctgctgtgcaaaacgggctggaaattcctcagtaagttatacctaagttaccgcatgacccagcaagtccacttatgggtatatacccaagagaaacaaaaacatacatccacagtacatggattcacagcagcattactcatcgtagccaaaaagtgctcatcggctgctgaagaaacaaattgtggtccaaccttacaatggaatattctttgaccaccaaaaggaacgaagcccttgacacctctgacagcatggacgaaccttgaaaacatgatgctaagtgaaagaggccagttgcaaaagaccacgtagcgtacaattccattcacatgaaatgcccagaacaggcaaatccatggagacagaaatagatgagttgttgccaggggctgggggagggcgcatggcgagtgactgctaaggctaggggattctttgggagaggatgaaaacgtgcaggaattagatagtggtaatgcttgcacaacttagggaatatactacaatgcattaaattgtacactttaaaagagtaaatgttattatcagtttctaaaaatgaaccagaagctcacatagcctgcactggtcagggagactgatgctcactcaggtgatctggaaggcgtggcccgtgcaggggaaggacagtgcacactccagcatgcccacgtggtgccacgtcccattttacagacatgagaagtgaggcttggcgagggccaccgtcagaaaggaccggaggcaatcaaacagcagaagcgcttctacacactaacagcaagctacctggaaaagaaatcaagaaaacaatcccactaacaatagcatcaaaaattaaaagcagaataaactacttaggaaaaaaattgaaccaaggaggtgaaaaacttgtgaaaaacttaggaacaaattaaaccaaggtggtgaaaagcttgtgcactaaaaaccataaaacaccagtacaagaatttgaagaagacacaaatcgacggaaagataccctgtgttcctggattagaagaatttatattattaagatgtccatactacctaaagtgatctacagatttaatgcaaggtctatcaaaatttcaatgatgtttttcacagaaatagaaaaaaaaatcctaaaatttgtatggaactacaaaaggcctgaaatagccaaagccattttgagcaaaaagaaaaaagctggaagcgtcacactccctgacttcacaatgcgttacaaagttacagtaatccaaatagcacagtactggcataaaaacagacacagacccatggaacagaatagagcccagaaataaatccatacatgtacggtcaattgattttcaataaagctgtcaagaagacacaatggagaaaagagaatatctcccataaatattgttgggaaactgaatatccacatgcagaagaatgcaattagattcttacaccctctacaaaatccagctcagagtggattaaagacaaacgtaagacctgaatctgtaaaaacaccaaaagaaaacatagtgaaaaactatgcatcagtttgagcaatgctgttttgcagatgatcccaaaagtacatgcaacaaacgcaaaaatagacaaacaggatgtcaaaccaagagacccttgcacagccagagaaacaatcagtggagtgaagagatggcccacagaataggagaaaagattcatgaagcatacctctgacaagggttcacatccagaatacgtaagaaacccagctccatagccagaaaacaggtgactcgattaaaaaacgggcaaaggagccaagtagacatttctcaaagggagacacacaaatggccaacaggtatgtggaaaacatgctcaccatctcgaatcatcagggaaatgctcattgaagccacagtgagacatggcctcacacctgttagaatggctattgtcaaaataacagagctgaccagtgctgtgaaaggtggctggtctctgagcccacccagccctgggtgatgactgatgcttggacctgggaagtagtgagaggggccgggagggagtgagaggggtgaggaggaagccctcctctgcgccgggcacctcacgcatttgtcacgtcacgcagaccctggaggaggatgcccgtggcccacaaggctggctgccttttggcccctgccctctccagctataggtgcccccgaccctgcatccctcaccctacaacccagcaccacctcctgggatatccctccctcaggtagggggtctgattctcctgtcctgccctgtctcattctcttcttggtcttccgcctccaggaggccttccctgaccaccactgggggatggagcctcctggagcacccctgcatttccccaacttggcacactccgtagcctgtgtcttttacattcccgactaaaacaagagctcatgaaggccagagccatgtctcggtcgcctttgtgtcccttccatggttcttggtgaaagttcccttgtgggtgattattcccgtggtacaaaggaggacaccgaggctcagcgaggccaggtggcctgcccagccccatggctccagagggtccaagcaggactcacactggtccacccagctctcccatccccctctggtggatcccagagccaccccccaactctcccctacttccggtagatcccaccagatccccctccctctccccacccctctggtggatcccagcagaccttgctcccctcccccctagtggaggacaccccctcactctctccaccagaggagggcccttcctcccctttcacctgtagcagaccctctcccccaccccccatggaggaccccttcactctcctcctggtagaagacccccccaacacgtggagacccctcactcccctcctggaggaggaccccatcccccttcccttttggcagaggagcctccatggaggcctcactcactgtcccctctgtgcttgcagaggctcgccgccatccagcaggtgctgaacgcacagaagatcagcttcctcctgcgaggcggagtccgggtcctggtggccctgcgggacacaggcacaggtgagccactgggagctcccctgcggaatgggtggaggaggcatccgggccctggagaagccatgtccctgcagggccctcgggcagatggcccgtatccccctcctggtgggtgttcgcctctgatggaactgagaacccacccaggtcagacgcaggaccgcgctctccctctgcggatgccccatggagcactgctcttacctgatacccacgcttcgggtctcggataatctctgccccttccccaacccacagagctgtctcctcggctgtcagtcatcctttcccctttggggcaaaagcctttgcagaagccgatgagttttgctctgctctgtaaagacaccgtgcccttgaaactcggcaggttcgccccacaccagcatcaacatagccggggagctctgcccacagcctccatccccagtgggagccaggtcaaggggcggggacctctccaaggccacacaggacgcactcctggtcatttatggcctctggcccctctcagccacatcaggagcgccggccacgggcatggaacagcctccacaccaaggaggctgtggcagggacaggcaggggataggcagggacaggcaggggacgggcaggaacaggtgggggacaggaagaggtcaagccgggaatgggctggggaagggctggggagggaatgggaatgggctgaagacaggcaggaaatgggccagggacaggcaggggacaagctggggatgggcgggggacaggctggggacgggtgggggacagacgggatgggctggggatgggacagggatgggcggtgcccgaggtcctccactgacaaccgctttgcttgcaggtgctgagcagctgggcggcggtggcggctactgggcggtagtggtgctgtttgtcatcgggctcttcgcagcgggagccttcatcctctacaagttcaaaaggcaaggcccttggctgccctcctctgcggggctctgaccatggggccgtaggaagccaggcccaactcactcaggcagatctagaaagggccccagcagggcctcagaagggagtggtgagagtttgtgcctgtgatgggctgcagggggaggtgcttgcctggctctgtaccacctgtggggtccctggaagagacggccgccactcgcaacccagagagcatcaccctcccactcctccactctccccaggacatcccagccatcatgctgttcagccccacccacctcacagggaggacactgcccatctcacagatgaggaaaccaggctcagagaggttaagcagtgtgcccaaggtaacacagacggccagcctcagaactgggacctgacccaggcccgcccacatcccagggttcctcggccgcccgcccatcccttccctcccctcgagagcacttgagagctgctgagcttcctgccaggcgctcccgtggggagggctctgggtgtccccgtgagggagctgcttgtgccgaggctggggtgaggtggcaagaacagtgtttgtctattgggaggggctttcatacctctctttccttctgagcctgttccctggctgtgaaatgggtgtgatcccccgacgctgggacgcgtcatggccaccctgcaggggctggacaacttgaagttccctggacgctagacctggaatgagcaaagtgacccggccccggcagcatcaccagactccttccctgcaaacgcagctcccagatttggccctattgtttctcccctgcctgctggttcagctccgggggccccagtctccccatcggggtcacccttgaggatcatcaaatgccacagctcaccccttcctttcggcttatttggagcctcgggcccttccccgatgccaagccccagcctttcatgggccctggactcccccaacccctcctcctgctcccggtcccactgttttatgcactgcgggtcttttgagtagtagtttcatgtgtgcccccgttccacaggctggcccaggctctgggacacagcattaattgtctgggagcgcgtccaggagctccttacccaccttgttactcaattccacccaaagggttggcctgaggcactcagagctgaactggagaatctgggaggacttccctgaggaagtgacttctggtggggatcctgaaggatgaataggagtctgtggggcaaagaagtaaaatagggtctgtcctgtggtctttcccaagttccaaactcagagaggcactggcttccgaacaggtctatccaggggttccgtaggcactgcaaatttaaatcaaactcagcatcttcttcccccaaagctggtgctgagcaaatgacactgtcctctaccaggtgcccaggtcaggaatcccacctccttcctgtgtgctccccctccagcctatatcccatggccactgcaactggggtttgtcacagctaggaggtggcaggggcggccttcgagcccaggctttcaggtcctgaaaccaggcacccgactgccctggaaacaaaagcagcttaaagttggtgctgacaaaccccagggctgtgactccagtctctgggagcttgaatgtattgggcataggcagaagtgcccaatatacttcaaggctccatctcacagcagagcaacgcccgtttgtccccagtggcctgaggctttaggctctggtgcggcctgtgccctcgggagctcccggcttgctcaagggctgggctgggcagcactgacaacccagtcaaagccctcagccacatgcccctggggcccggcaggggcttggccctcgtctctcaaggctctagactgaggcagcagcgctgctttgagcatataaatccagtggtgaagtgttgcagcttataggtgatactggccaccctctgtcaccctcagagctagtcacaggtcccgccccaccccatcctgccgttaaaatgtttccagagggctggcgatgttcatcagctgcatctgagaaagcccccctctcccactgagtctcagtcccctcatctgtgaaatgggaccctgaccctgggttttgattggactaagtggggtgtcgtgcatgaaggagcctggcccagggcgggtcctgagccgggtcccagtggaggcagcggggctgtgcccaccctctccctttcctcgctgggaaatcgaggacagtactcccccaggacgcctggatggggctcagcaagtgcctctcagagctgggccggctcgtgcctcctgcgggaatgtgtgcccagcccagtggcagggtggccaggcatggggggtcgggggaaagaggatatcatgccctctccccaccacatgcccacgcttcgattctcaggggagatgacagatacacagtgatcacccaatgtgtcagggcagagggaatcccagggccaagggagcatgcaggagggagggcttcctggaggaagtggctttgagcagagatggggcaggaggcaaaacttggggctggggtaggcacctctggagtgctgtgggcaccgtgcaccacactcggtgtggtcaggcggccagcggaaggctccagggacaggcggcctgggaagcccctccaagctgagccgcccttgcctctgtccagcaggaaacggccaggcaggaccgtgtacgcccaaatgcacaacgagaaggagcaggagatgaccagccctgtgagtcacagtgaggacgtccagggcgctgtccagggtgaggagtttatagatgatgatctcgactcgcagactctaggtaacgtccgccccaaacccaccccgccctcccacaggccaccccgctgggccgctggggccagcaaaacgctggcccagcagcccttgccagcgggtcggtcgggcccactgtgtcccctccatctgatgaggggatgacgggacctgacagggctgccggcagagatgaaatctgagacatgtggacgctgagggccccatccctggcaatgaccaaaagcccccgacagccccatcaaggcagggaaaggacgggaaacagggctggctttgaaaggaagcctgactcgggcctcaggacgtgggaggcctttcccccacagccgctccctcaacactcccagtcctccacttcactgcagtggtgatctagggagcacgccacacatggacctgcggcactgcactttacagtttatgaagcatttccactgatgggatccccttcgctcctggtcatgcccagcaaggagaagatcagtcatctacagctgcatgacaaaccgcccacctcagcggcgtagcatcgtttatggccgttttctcttctggtgtctgggagctgactgggctcagccgggctgctcgctgtcagggtctctcatgaggctgcagtcaatggctggtgcagcagtcatctcaaagcttgcctcactcagatggccagcaattaatgcaggcagtcagctaacccctcacctggaccatcgaccgggacacctgcacatggtctcgctgtgtggcttgggcttcctcccagcatggcggctgacttccaagagcatgtggagggaggtggccaggcaggagccacacccctttcagggcctggccttgaagtcatacgctgtcacttgtgtcttgccctgtccatgtttgaggggaggggacacggactgcatccctcagccgcagtcagagcatgatgccatccagcgcaacaggcactatagttctttctctggatgaggggggaaactgaggcccaggaggctctgagacttgccagagggctgggagcctgtgctgccagggccgtggcaccagccctgcatgccgtgtcgggcaagtgccgccggcagccaggcggtgtgggcactttccatgcctgtctcagctcagcagccgaggaggcaggctcttccctagagctgaggacatggaagtgcaaagacatggactgtccttgcccaaggtcacagctggtggtgaacggagctggaagtcacatcttggcagaccccagggacccggcgtctcccctacagttcctgttctctcttaatccccatctgggcctgattttatggtgacgtcggcacacacctctcaccgttgctgcggggttctgcggtagcttctggagcagagaacggcacacaggaagccacggaggtcttggcaccaccagctgctgccactgccgttctgatgatccggcttcgagcgtcactcacactctgcatccgggacatcctcagaacgtgagcggcggaaaccactgtccccactgtgcaaattattgaaagtgaggctcaaaaaggagaagtcgctcaccccggccagccagaccccaaagcctgtgaccttcacactgtcttgagaggggtcagggcagctgaatggactggccacggtccctctctgcctcccctgcgcgctctccagcccctcaccaggcctgtctgccccacccccggtgggggtcccttgtctccagcatcgccagcccaggtgtgttcctcatggcgtgatgcgtctgtagacttggaaacatcacaggacccaggtacttcacggagcgctcgctctgtgtcagccccagctcagcgcctcccagacaccgtctgacttcccggaggcagtcatcgacattgcgcccactgcacagatgagaaagctgagggtcagagctgttactcaacctccccaggtcacttagtgaaaagaggtggagccgggctcaagcctgactcagtggctatacagctgtgtgccccccgaaggccccgggccgcgggtgagcgtcctacaactctaaagacccctccactggtcttgctcctgctggggcaggaggtggttttggggctccctctcctgcaggcggcatcacccccatgctcacccccaggccttctcgagtggacagaggtcacagggtctcaggaagacagggctcggctccccagcccccgatggctttttgcttccaagcccctaaagagtaatcctagtggggtagtaagattcatgcagccaagcccttggtccacgccagccttgccaatgcagcagccgcacttccccgtctgacccacgccagtcctttgaggggtgcggttgaccctcacgttagagatgaagaagccaaggcccagccaggtgaaggatgggcgaggactcaggcaaggactcaggtgtgtctgggctgtgccgcgggtgctcccagccgtgtctcccggtgcccttgaggcggggcagctctgggtcctgggtcctcgacctgtctccttgactcctaaccagcccccacccgggacacccggctcaccccttggcactgacatccctatgcccccctctctcccactctcgcctcccggggcctcgccactctacgccctgcagcgcccactgccaggagggggcggagcctcagcccctctcgcacccccttgctgccgatgccgggggcgatccccacgcaggtcagtggctgtggcgggttggggccggcctgggcctcacctctcaggccctctggggcccactgcttgtgatggcaccgggagagcccactcctcaggcacccacctaggaaccgcggagaccccctgcacctgcacgggctgaaggaagccagggaggcccactgcacgttggctcgaggcactgcctgaggccacgaccgtgtcccctgtggccctgtctccagtcccgggcttgtgctcacgggacctgcgtctcttctgtttcctaggcaaccactcaggcgtggtcctgagcatcaactcccgagagatgcacagctacctggtgagctgatgccaccccagcatctgtcttttcacccacggagggcacagaaccaccagcaaagccggcggctggactggcgcccctcagagacctgcggaaagccccctccctgagtcgtcgccacaccaggcgacaggcaccaccccctctgataaatccaagcccgcccaggcccacggggggcccacgggaccccccgggactccccggacatggccctgcccctatgggacaccaggcctgactcaggcaggttctgccccccagaccccacacacggccgccccacgtgctgtcgctcagcccgaggcctgacttctctgggctgaggctggtcgtcctggagccctcccagtacctcgggctgcaagagctgcagacccgttcagacactgcgttgcgggctccttccccgcagaggccggggcctccctgactttgcttcttcactcccacctgtgcggccacccagtccctctgtgggagcccgggtgccaggccctcccaacaccacaccaccctccaggcccccctgccctccggctggaaactgcagctctgtaaatgcctctctaggtagctgctggcggtggtgggggtgtctcactctctgtctttatagccggcggtagccaccggggtggctctgtcagagttccgtactcgggagcccctttccctgagtgcccagggtgtctcctctgcccagaggggcagcagctctccctggttctccccagggcagacggggtagggcgggctcaggacccagtgcccatggttcctcactcctaccagcaagcagcaccatcccgcaggcttctcccacctgatggctgttctcccaccgggtctgggctctggaaggagccagatgcccccagaaaggtgggtggtggagacggcaccagatgtaccagttttctgcagttccttataggcgaagggaaccgggtggaaaccaagctgggagaggctgaggatggcagggctggaagggccatcagcgtgaccctcattttcaagaaggggaaactgaggcccagggaggagagtaactgaaggtcacagcacggtcacagcagaggtggccgaacccagccctctgcgcgccagtgctgtgcggtctccacacccttacggtttcctagaatcagggatgttagtgtaagtctataggaatataggggggtgggggggtcaccttttgccttgaaatgggaagtcagtagccccttcctcctcctccctcctccccctcctctctggcagggatctcagatgaccgtggcctccctctcagagggggagaacgccagagccctggctggtgatgtgctggctgggggtgaatcccaatgagggtccctctcagagcgggagaacgccagagccctggatggtgatgcgctggctgggggtgaatcccaatgagggtccctctcagaaagggagaacgccagagccctggctggtgacatgctggctgggggtgaatccgaatgacagtgcagacgttctcccatccaccatgtctgagcttgggggaattgcctcatttcccctggaaaagaaacatggtccattagaggggaaagcccaggggtgaatcttcacgccccaaacagtgcccggtggggaggaggcacccgctccttgttgagtaaaaccacccatggagactggaacctcatctccctgggtcggggggtgttcaaggccacaggacaaggggagcaccctgggccacacaggcgtggaggtgtccccaccccttccacctgtcccccagacccaaagctctctccccaccctacctgcccacctggggctcctgtgccccctccccactccagaggccaccctacaagttgtcctcaaggtcatcctggagatgggatccaggacgtggggccatgactctctgggaccttgccacagcccccattcccctgcttgcagtctgcaaggacacctttgcagggattcttgtcctgctggccaccccacccacacctgtccctggccagcaggccgcctgcaagcgtcaggcacacagggacagacatggcgagcacagtgcaggcccggggcccacgggcaacatggaaccctgggaactgccctcccccttagctcacagtgcctgcggtagccactctaggtcgttggccttccttgaccactccatttaattctctctgctgtttgggttgggtttttccccttagttatctgtgggtttcctgtattttatgttaatatttctattaagaacatgttgggcatgtggacccaagcacctgggaaggaggtggcatctgagacagcctgatacgttcccgtctgtgcacccatggagatccaggcgtgggcccgtgtctgtccctggttgtaaattcgagggtctgcatatctgatgttcaggtagacctgggcgcctgggaacgaggccatcagctgccatgcacataacaaagagacaatgcattccttcttatttttcctttttaaaaatcgatgaatcatttgtgatgcttttaacaaagattaaatgaatttgatcagcttttgccttattgtgaagatactttcctcctttcctgaaatgcatgtgggtgcacacacaggcccctaggatcgtggtcccagaggtgaggtggctgaggacctcgtgcgagggacaaggaccaggccctacacgttgggacgttgaggaaggctgcacatggcagtggccttcaaagtaatgatctccccggtcggctctcaagcactttcacacatgtgggctcgttctgtcactcaaggccagcagaaggggaaccagaagtgtcagccaattttccagaagagaaacagagactcccagaggctgagggcctggaggtggtgcagcacagtcccacatctgatggggctcctttatttctgaaaggccatttgctttagtctttgagttgacagaaagaggcatggacttgtctatcccaattgatgctccagcctcaaaagctgtgcattcactatagctagccactgagtgtccacaccttctctgaaacttcaactctaatagctggaaaagaacactctttcttctcactctcacatggttagagagagagagagagagagagaggtggatgaacatactttacagatgtgttcacatttgctaagtggtccccaagccatttctggaaagaatgaggttgcaattgcctagtggctgctcagggggagagagctggcaaggggctgacagcagacaccctggcatcccagtgagcgtctgctgtgcctggaactgttgtccccaaatatggtcaacttgcgcgtgaaagtattttaagagctgtaataaaacaaggcattcttttcacagcatggagtgatggcgattctgtttttgacttgcacacaagtcagtgcagggtggggagcagggaattgcccccaggtgtgaccgctgaaccatgtccagttggcagggataaaatagacccactaaggttgggtagagcggcacccctcacgcgcgcgcgcacacacacacacacacacacacacacacacacacacacacacacctccttctctgggccatgacatgttcttgtggagtaaaaactggatttcaacatcaacttcctgccagatctgatgcctctttgaacttgtgccaggccctgggctgggctctgggcctggggcagcgaatgaatgcgaccaggctccggcccctggaccttgaaggagactcagcctgggtgaggtggatgatgactgcacagctcaaccagggagcacctggcccagctaaaaatccctagtccgaagccatggttgagctgggtgcaggccgagtgcaggtgctcatgagaagacgcaaaggagacggatgtccagggttggtgcagtgcagaggccagcaaggggggtgtgtttgtgcttgtgtgtgaccagtgacagagagagatagtgtgaacacagcagtgtacttcagagccctttgcatgtgaccattttattcccttttgctgactgccaggactcagggaggaagtgagaatccc

SEQ ID NO: 574 - DNA, 18110 bp, Homo sapiens
  source 1..18110: mol_type = genomic DNA
aaggtgagatctgttaaagatcagtgtaaagtcctgcttttatctaaaacaaaacaaaaacagcatacatacaatttggatatgactttgcaatggatattgtctaaaagatcggggtttcggttaccatccagcttcacgggaaccagcagttttggggaggttgcttgaagagcttccatgatgcaggtcctagatggagggattttggccaccctggggactgggctacttcttggtgccctgcctctcccctggtcctgactaggggctggagaccgcagatggaaggaagggagctgaggatgcccagtctggagcagtggaagatgcattgctccagatacaaagcagaagcaggggctgcaaaccacaggcaggtggaggggatgatggttaaaaatgcaagccttggagtcagagctgggttcagattctggcaccagcacttcttagcatcagcctcgcaaacttcagtttccccatctggaaaattgagataacgatcggacctaccccttcactggcctgaatgacataaaacccttggtggagcacttagtaaatggcagctggatataagctgttatgagctgggtatgaggaagaacttccaaccatcggagttgttcatcagtggagcaagatggcaaagagtctttggagttgtgtgcttgtgaggtggagtggtcctggcctctgggtgcagtttggacttctgctgaggaaagagctcttagggagtaggcgcttaaggagtagactgtctgacatccttggtctggacttggacatgggcacctgctgtgaaggcttggctagatcctggcgtgggctgctgtgtgtgtgctgggggaggtggcaagtggggggatgcagcaacacagggcctatccacacatcctgaaggacaggcctctgactgcaggcagcacggtgtcaccctcagcccacctcctcctcttcagatacctgtctcttgaattctttgcaaactcccgtctgctgagtgctgggtgagcagaggggctgcttgcaaggcagtgagttctagctgagccagttaagagtgagtggcccccctgcagtgtggggcatagccgccgggctggggagaagttcccatctgaggcttcagtccctgagctcagatggaccccactgggatgccagctgtcctaacactctccattgttcccactttcttagcagggagagagacagaaagagagagaggagagtgggaggggggagagagagagaaaggagagggggaggggggagagagagagagaaagagaggagagaagggaggggggagagagagaggaggggggaggggaagggggtggggaaagagggagggaggtgggagagagagacctttgatgatctatcctttgcattctactcctagctacttccagaaagcatttgaggaagcaccagtacagggataagagatgaagagacaggccaggtcaggctcaccaagcaggtaaccggaacctttaattttattatgtggaatgcttaatgcagagttaataggggctagagtggctaggagaggggactactgagataaataacaggagacagtaatgagttacatgtggatttggggggctgcagaacaggaaaataggggcagatatagctacatactttattcaaataccactgggaggcaaggggtaagaggcaagggcagaatgtacaggtcaggattctagtgtcttcagcctgccgacagcaacctgggtgctgggccctgtgtctcctggagccaagggttagggcctgagcagctgtcactctctgggaagcccagggagtggggctgactgagcaggggccatagagcctagtaagggaagagggagctggcaaggagcccagggagggaggctctgtgaattgtctctgattcctttcctggagcccctgcctcgtcacctcctgggatgcgtctcaaggtcatggaggttgtagtggaggaggactgggggctgtttctcagacaaagaatgaggttattggcacagaattggatcagggggcctctgtgccaactccttcctgccttcagaaagggagggggcattgaagggatgagaactccactaagtccctcgaaccccccactccccaatgaggctcctcaaagctactctcagcccctgagtgggagacacggccagctccgggcacagtctctgggtggcctagcccttaggcactgtggcataggtggcatgggcatgtcagaccctcactatctgtgagagagaaaacaggagtcataggagtggtaaggcctccgatgccaccaaccctggtgcttcccctccccgaggagggtgagcaggcccttctcaggtcctgggatagagggtcattcctgggggaaggtgcagcccctcatctttcagtgtgggtgcaacagtcaacctccttctcctctgtccagcctgttctcctggggctttgctgctggagcctggatggggcgggtgggtcatcagggcagtgagccagacagaaagccccccgacctgtcagcctcttcagcctcctcagcctcctccactgccaccaccaggcctgaggtgggcaaggaacagggcacacaggctgggggcaggggctgggcggggggtggtggcgacagggccccctttagggccgggacagtgtcgtatatactggctgctcccagtgtgtggggctgtgggactggggccctgaggggctggggtcagagatggccgtgtagaggggccgctgcgagggccccatataggagaaggccgagtagaggccagaggcctggcccgagtggccataatagggtcctgagggctgatggtcagagtagtcaaactgggggcgggagatggaggggaaggctgagccatagtggggcaggctgagggaggtgtaggcgatctgtgaggtggatggctggtcggtgtagtgtgggggcccctggggccccgcggtctctgtcttcacctgggctttggcatccacaccaggtggtgagaccgtgggcagagccacgcctggtggcttggagatccaggcggagtgtccactggccacggccagggcactgcccagcccatagccggctgctgagtagctgctcacatggcctgggtgcccattgggcggcaggtactggtccaactcagccacatcaaaggtctccatgttggacattacctcgtggctgatctcaccaatgtccacgttgccgaagtcgatgtgaggcttcccgccctcccccatggagcgcccgtcccgcttcgggtctgccttgcccgactgcagctctgtcttcggggtggttggaggggtgggtgggccatggctctggcctgggtagaagggagacagagagagagagcgcaagggggaagcaggttagaggcaggtgggcgcacgtgaacttccatggttcaccttcaggcagcgggtgcctctgggaaaaccttgtaagtttcacattttggcagcatgagtcgggtttttttttgttttttttttttgagatggagtttcgctcttgttgcccagactggagtgcagtggcgccatctcggctcactgcaacctctgcctcctgggttcaaatgattctcctgcctcagcctcctgagtagctggaattacaagcgcccaccacaatgcccagctaatttgtgtatttttagtagagacggggtttcaccatgttggccagggttgtcttgaactcctgacctcaggtgatccacctgcctcggcctcccaaagtgctgggattaccatcatgagccactgcgccccacagcatttgtttaaatactggtgtcttagattgatctctagttgtttatgaaattctcaaatcttagggatgggtcctggggaggcctgcctcattctgaaaaaacctttcctgtggaaagttcttcctctcatcagcttctctgctgtccaggtggtctggcccagcctttgcgctctgccagccccgcttccacacccatgcctactgtcttccttgctgagcctcgctcgcccaggctcctgagtgctctgtttcacctttgctggttgcctgggcctgctccctgtcctggcctcatgttgtgtcctttccaacccttccctcctcctgagcccaccctgcttcccagcccactggcaagcccttagccccgtcatacgctggcctgtgttgccctgttgttctttgagctgccttcctccatgggagggcacttagaaaactggtccttgttcctttgtctgttcactttcctattcacatattaatttagcaaactcttagggagcattacaaaatgccaggtactgtgccaggtgctggggatactaatgtaaataaaatggatccctgttcccaaaagctcatagtctagtcatagatccatagatccacatgcacccagagttggaagtgctgtggtgacaatatgcaaggacttgggagaccagaggaggagtccacccgctgcctcagggatttggggaaggtttgatcagggaaggatgtctgagtggggtggggccttgaagggtgagaaaaagtctgtgtccagtttcattctgaggtggttgctctgtatgtggtccagggtctcctgatgtgtgtgtgtgtgtccctgaatctttgaaggtgaagagtatgtacacgtgtgtgggagggatgactgcctggcatcccaatggagacagaacatgtccatggtcttaagagactaggagctccccaaggacaggcctgtgcctccttcatcagaccagaggcagcgccaagtcctgcattggccaagggctctgtacttcaagagacctgcctaggcttttgaatcctggttctgtgtctggacaaatccccagtcttctcttaactagtttccttatcagtaaaatagagattgtaccaagcagcccaggcattgcctctttctggaagccttccttgacaagagtctggtgggcagtggggtgttcttggagacctgactggatgggatagacggccatgccacctctggatctcacacagacttcttgtgcacttgtttctctctctatatatatactatatatatagtaagagataggaggctgggcgtgctgggtcatgcctgtaatcccagcactttgggaggctgaggtcaggaattcgagaccagcctggccaacacggtgaaaaaccatctctactaaaaatacaataattagctgggtgtggtggcgtgcatctgtaatcccagctacttaggaggctgaggcacaagaatcgcttaaacccaggaggcagacgttgcagtgaaccaagatggcaccgctgcactgcagcctgggcaacagagcaagactccatctcaaacaaaaacaaaaacaaaaaaaagacagagtcttactacattgcccatgctggtctcaaactcatgggctcaggtgatcctcccacctcagcctcctgtgtagctgggactgcgggcgcattccaccatgcctagctttgtttcttcctgtacttaattcactcgttttcatccctgctcctctctctagactatgggcccctgaggccagggactgtaggcttctctggttagtacccctggtgtccactccagtgtttgacacaaagtaggactcagagcgtgtcctctgaaggcagagctctgctcactgagcacttcccatgtggcagacctgtgtgtgtcactttctgtacattaggaacacaggcaaggcagctgtggtgccaagcagatgcccgggagccaaactggggaagttcctgtttgtttctcatcagtaaaatgagagtaacttgccacagctgagatctgagcccaggcagtttgggtacctcatcacattgtttgcaaggattgagttagtatacataaggcaactagcacctagcacagtgcctggaacagagtagctgctcaattaaggttagctgttattatcattaatgaaaattaaacaagatagcttatgtctggcccatccatggccagacacggtatcacatgccatgtctcctctgtcagaatggctggtgggatttgggaggccgaggcgggcagattgcctgagctcaggagtttgagactgggcctgggcaatatagtgaaaccctgtctctgctaaaatacacaaaatgagccagacgtggcggtgtgcacctgtagtcccagctacttgggaggctgagacaggagaattgcttgaacccgggaggaaaaggttgcagtgcaccgagatcatgccactgcagtctagcctgggcgacagagtgagactctgtctccagaaaaaaaaaaaaaagaatggctggtgggaaagaggcagtgatttcctctcctccatttgctcttccatttctcaaaaccatcctgtcttctccccctttacttgtaactgccccagccacctctcactccatgacctccacagagtctttttttttttctttctctttgagacagagtctcgctctgtcgcccaggctggagtgcagtggcgcgatcccggctcactgcaagctccgcctcctgggttcacgccatcctcctgcctcagcctcctgagtagctgggactacaggtgctcgccaccacgcccagctaattttttttatttttagtagagatgggatttcaccatgttagccaggatggtctcgatctcctgacctcgtgatctgccctcctcggcctcccaaagtgctgggattacaggtgtgagccaccacacccggcggcctccacagtctttaactggccctctttgcccagtaggatcagccctggccagagccatctcacccagccacttcccctggcaccggaacccccatggagctccctctgggcccctgcagctctgctggggcaactgcacagcctggcacgctctccctagagtccagggtctcattgccatccagccatctcctgtctccactgactggccttgccccaccctcagctctgtcatcagcactcacctgaggggtgctcggggttcccatctgacatgggggagccctctcctgggtgccggtggtccaagtgggcgctcttgtagtgggcctggatggcggcggtcccaccttgctcggcctccccaccggggcactccgcctcgccctgggcggccttcccgttcttccgccgcctgggctggtacttgtagtccgggtggtctttcttgtgctgcatacggagccgctcagcctcctcgatgaaggggcgcttgtcactttcgttcagcagcctggggtgtggtgggaggcggagaggacagcagaggggctggcgtgaatgccagagcactccaggttggcctccctctgagtgtccatcttggaagatgtgaggccctgggatggggcacccagaggacaggacccggggtgggggctgtgccctatgatttgtggactgagagatgtgaggcccaaggaataacagcctcagagggctgcccccaaatctttcatgggctggagggtgagagaggggtcagcccgctgctcctggcagcccctgaggaggagttagaagtaggagtagaggtttcaaggggcagatgccagttcaaggaaaggaaaaactttctcatcatcaaagctgtctgcaagtggaattggctacttcagtgggggtgagctccctgggactgagggtgggcaatagaagcagcatggctgggggagaactcagtctctgctacttactagctgtgtgtgtgaccttgagcaaattacttctctgagcctgagtttcttcacctataaaaggatgataacattggcttaacttgggtgtgggattggccagaataatggatgtgagatgccttgcaccagggcctgggaagcgggctgagcaccttgaggaagaggtgcttttctttctttcttttttttttctgtgagggaatctcactctgtcacccatgctagagctcagtggtatgatctcagctcactgcaacctctgcctcccaggttcaagtgattcttgtgcctcagcctcccaagtagctgggattacaagcatgcgccaccacgcccggttaatttttgtatttttagtagagatggggtttcaccatgttgaccaggctggtctccaactcctgaccttagttgatccgcctgccttggccttccaaagtgctgggattacaggcatgagccattgtgcccagcccaagaggtacttttctatttttaattttttatttatttagagacagagtctcactctgtcgcccaggctggagtgccgtgatgcggtctcagctcactgcaatctcggcttcctgagttcaagcgattctcctgcctcagcctcccgggtagctgggactacaggcacgcaccaccatgcctggctaatttttgtatttttagtagagacgaggtttcaccatattggccaggctggtctccaactcctgacctcaggtgatccacccgccttggcctcccaaagtgctgagattataggcatgagccaccgtgcccggccccaagaggtgcttttctaatgctgcttgcgggggtggttggacaggaggatctagggttggactcttaactctgggtcctgattgtgtgaattccagtgtggtgggactgagggggcagatgtggctcctctttaccatgggtctgggtggggggtactgcctcctgtgggggatcctatatccttgtccagaaaatagcagagagtagaggaagctagcctctcctcagaccctggaacagtccctgaaaccaacacatggagagaagaagccctgaagccagcgcccttgccaccgactccagccttaggccagggttggagggtggagggcatttagggtttggctgccccagggtgaggagggcaggatggggtaccttacagagggggtcgaggggaaagtccagattctagaatcccagaccttggtactgagaatccatgagtctttgtgggagcagccttgtctgtcagtccagagggcttgtctcttcagctgccccacccctcacaccccagtgagtgccctcttcccccagtcagcagaaggccgagccctccctccccaggctgggcgggggtggtcatgccaggcacctcctagccggcagcagcattcctctgcggcttagcctccctgtctactccccccaccccggccctgagcccagccctagccccagctttctcagagggtccctccagccgagactctgtcagagtcagtgtacacacttaggacaaagatgccggagcagggccttgagagtcagggagtgggatgtgggcaccctctctgacggctgggaccaggggagggggtggagcaggccttgagggtgtgactggggagaacccacagaggagagagctgctccgccagcagtggaccccaacagaggggcttctgggatggctggggacatgggacacagagctcactctttcacctatccttcccttgccccctgcccagctggcagccagcatcagcaagaaagtgacaggggccagaagagagagaggattccaacatcggattccgctgctacctcctaagctagttcccagcattagcctaaccctgacagaaatctaagcctggggccactgccatccccgaccccagctccctcctccaccagctgtgccggacagctgattccacctccaccccaaccccaagcccagcctgcccaccatgtaaacccaatctccagcaccagtccccactcaacattaccagccccaaacccccaacttcgcctccagctctaactccaaacccagtcctcatctgcaccttcctgtcagccctctttctccctggtctcccaggtttggaatgggggcaagaagaggtaggctgattcctcacccaaactggaaaccccaaccggggacctcccacagtggggcactgattgctgctacctgtgtcctgctaggccaggggcataagaagactacttggggaaggggcctgtggcactgggaacagaggctgggtgacccccaccacacaggagggactcttgcctgtgtccgcctttccagtttcttggctctggttctttccaggcagatcagccaacccacaggcaccaccctgtgatcagcctcaactagcccctccccagatgggcatcaaaggttagaatgactgttggggctgacacggccccttaggacctgggctccagtgtgtctgatcccacactcccttggggcactccacacagtctgtgtgtatctttctctttttggttttaagacacctgttttccagctctgcctacctaaccaccccacttcttgacatcccaggagtcacagcttggggaggtttcaggagaagcccctggagcaattggccagcccagcccaaatccaaatgtctctcaggacccccctccagggtccagggagccaccctctgttggcattgcctttgatccttgccatggttctggccccatcctcccattgggattgggtcctcagcaagtagtgccagttttcctgactgccacacctcaggctggcccctgtgcacacagcttgagtgatggccaagaataagtcctcctgaagggagtccaagcccagggttctgggctgggggaacctggggacagggacaatggaggagccaatcttaaacccttggcaatgggagatggagggaaaatgaggtccgtccttgctttgactctcgttgggctcgtactgtggtcttctcatggtccccagagtctgccctatctgtatgtctctcctggttgtctgtttctcacttgctctttgtcccctggcactaaagatactggcctgggccaagccccacccagatctggatggaccttgggtggaggagctagctgtgacctctgctcttgggcagaactgggctgtctgggtccacacagcgggctggtcgctgagccctgggcctgccctgggtgagcagggcactgagggctgagaaggggcaggggaaggggcaccaggtcttcagcaaacacatggcaagaacaggccagggggcgggatgtgaatcttttggtctcttggagatcctcctgcaccttctaccactctaagcctctagacccaatctctacccaactgtggctggcaagggggagggcagcggaagagagccgggctcctctgacaaagccctaattttctggaacccagatgctcctcactcttgttctcatcttcttgcttccccccaacctcctgaccactcctcaaagtgtaggtgatccaccactgtcaccagggtcaggggaagtcctctggacagagagtatgggagtcctgggttctggccctggctctgctaccaacttctatgtgacctttgtgattcctttgcctttctgggcctgtctcttggtcagtctagcgagaatcaggtgactgctaccggctcacatctcctggagtccctggtctctttcagagctgctctggcactcccgggtgggagtgggggactgtcttgttccacacatccccaggaggcctggctgaaccccagacctgagtcgagggtgggataattgctccctgcgggggatgtttttcctagaggtgtgggctggtcccagggaacctgggactctgagggcccctgggcaggaaggaggccaaggtttccttctggccagagtgctcagctccagctctggggcagtggggaagaggttgctcaacgttggggtggggccctggcagggaagatggcgccgaactgggagagggaggaaagagatcagcttggtgactctggggcagggcaggagggggagccccttactgtgtgtcctctccctaggaggatgaagaagcccccaactcaaaggagggtggcgtcagaaagtcccagggaagagccctaggataggatgaggtcccgcagcagcagatttgtcccgcagttcttcatccctcactcttccaaagactctcatctgaattccgttttctttaaacctcccctgagttctccatctgactgcctcagtttccctgaatctccagccaaccctttggttctttccaagcgtttccctcgtatcctcctgaccacagcagctggtggcatagtgtgcgtatctgtgggcaggagttagtgaaggcctccttccctccctccaaagccccaggccccacggtctgccacccgcaaaattccaaccacgagggggcgccttcctgcccgccgccccgtagggagacccggcctaggccgctggagttccgagttccagggtccttgtgatggaagggcgggcgcggcccccacacctggtcttccagccctatccaaggaggactgccagacagtcccgctctgaggtgcaggaggccgggccgcctcggctaccctgaatccacccgaagctagagggcccgagcccggggggcggtcgggtgctcacctccagagcttgcccagcgtcttgctgagctcagcgttgtgcaggtgcgggtactggtccgcgagcttcctgcgcgctgcctgagcccacaccatgaaggcgttcatgggccgcttgacgtgcggcttgcttttgctggcgccgttgacgcgcacgggcatgggcaccagcgtccagtcgtagccgctgagcacctggctgacggcctcgcggatgcacacggggaacttgtcatcgtccgcctcgccgtcctgctgctccttcttgaccttgcccagctcgcctggccccgggctggctcgcaggcccgatccgccgccgccgccgtcgggccctagcgagggcgcgctccccggggacaggcagcggggctcctccgagcccacggggctcagctccacctccgataggtcctgctcctccgccatgtcgcccccggccgccgccgccgccgcctcggccgcctcccccgggccagccgccggggtcctcgcaaagagtccaacgcccacctggatggaaggagggcgcgatggagcggccgcgcgcgcagccccgagggcggcccgagacaggacgtgggcacagccccgaggtggcggcccttcctgctccagctaaacccatctggcccctggggcccacgcacatgccagactctaggtgggtgcgtcccgcctctgtgtcttcccaccacctggtcccaaccgtctcttggtgtgggtggctttttttttagcctccttttttgggtggaggtttgttgatgataaggaagaaaaaaacggagcctttattttgctctaatcccggcccctggaatttcccaccttttctctcacctttccttcttccctcagcctgccccaacggggtttagaggagagccaggtggggggcaagggcggggtgtcgcctctctccacctcacagcagggtcccaggcctgggcgggccagggaggagcaggctgcgcactcacctcctcggacctctcctccagtctggggctcgtccttaggaagtggaaaaccgtgtcccaaggtgtgcggtccagctcggggctgggaggtgacgctggtgggctgggagggaggggcggggggccctgagcctcaggccacggcctcgttaggacggagcctgaatccttaccaccaaccaccctggccggacagcccgagactgactgagcgactgagcctgagccgctgcggagggctggggaaggaaggagggggagaggggggaggggagaggagggagggaagggcagaaggtggagcctccaggctttccttcatccccaacactcagggctcctccacccggagcccaggcccccccacccagctccctgccctactgcccaggcccatcttgctgaggcttatcttgggcttagtctgggaggtggaggggaggttaggccgaggaaggaagagatgtaggctggagggtcagaacctgttggatggaagaaaattgggcccaaccaggactcctaacgtctgcctcaggtggcaggatgggcacttggcaggggactagggagagacgtgaaggcggtgagggtcctgggggcccgtgagggtggctggccctagctgcttcgtctgcgaaatcctgttgagtgcctagtgtgtgccaggcactgatgcccagctcctcaccctgcctcctaccttttcccaggcagccctttctgccccatcctgcacagtaagagagacttctcagggatccctctgagaagtgcagagccccagcttgacccctggtcccttctctgcagacacccagcacacgcgcgttctggtctggttcaaggtggaaacacaagactaaagctgccaggaggccaaggtgggacaggttgggggccctctctcagtaggtcttagaggcattttgggttgctacctactgggacccagctccttccacactgggctcaccctgtcttgggagagggtaggggagtcctagtcctgattgtcacgaagtcctctactcccccaccccaacaaggggtggggacttgccctgcctcttccctcctctgcccacctctccctccctccccttttctttcctgcccatcctccgttgacacctttttctctctctttccttggcctctcctccaaaggtcgcagtgctgttctcttaactgagggcagccccgccggggtgttgaggccgaggtggggtgtatgtgggttatgtaatggagctggggtcgcattggcaaccatgtgacgttctgagctcctcaacagcagggcaaagccccaagaccaccccaaggggtcctgtctggagtgggctgcaaagggtctggggaggcaaggcctcatgcttgggaaagtccaaaggggtgtagggggtgggaaatgggacacaatgaggtagtcacacgaggcagaggcatgttgggggtggggggagcagacactggaacacacacacacacacacacacacacacacacacatgctcacacacacaaccagccagacaatcgggccagtgtgtctggggcctcggagcccagtgaattaggagtttgataagggttttctctttctctcgcttgctggccttggacaatctccccccagttttcctcgacgccacccccggcgctgccaaccctcctccccccgcctcccttctcttccctgtgcccagactcttgttcggggccttgaaacagtgagctgtctttgttcgaaatacaggtgaacggcaatcatgtgattaacacacacacacataaaaagctttttaacagcgcccgctcggcctcagaaccgcccggagaggagccgccctggatggacagagggacgagggacgagcatctgccgtcgtgtcccggctgccctgcagtcgcctccaacacccgctgctgcccgcccgctgcctgcctgcctggcatctctctctcccggtgggtccccactcatccttccacccctcagttcctcctctttgaggaaaggacctccccgctctctgctgtgtctgtgactggcctgagacccgcctggggcaggaggggtggttgtggaaggaaagagcccagagttaggaggtggaatgtggggtcccacagctgccccctctctaactccctgcttcctcctttgccctccttggtccagctgtgccaggatgggggtgggggtagcagtgggcacgctctgtctgcaggaagccacgctagacagaaggggccactccctctctctctcccttgtccccgcacagacactgccttcctctcagggctgtgctgggctttttgctgagcagtgttgggtgaggcaggtgggcctgcagggcgggtgggaagggctgtcagatgaccagtgctgtgtgtgtgtggttggggcccctgctgcgaacacatccctgcccaccatgctggcaactgggatcccctccatcccatcccaggccctgggaacccagtgctctccagcaggcaagggtgaaggacccatagtcattcctgaagagcagggagcttggagaggggagggatcctggctgaagacacctgggcctctgccccagcaggacaacaggagggccagtgtcaccttctcctcctttccctgctgggggtggcaggggtccctttaccccctcattcttgacccttctccagggatgcttgtgacctccttaccccaccccccatcacctctctgtcctgaagtgagggtttgtcaccgtccatggcaaggtgtggtgtctggtaggctctatgacctgccttctctcagggtgtttattctgcagcagagaggggtctgcggtctgagtgtaatggtggaaatccaggcttccttccatggcccaaggaggcctttccggagcaacagggttttcctgggactcagcctggcttttgttaaggcaggtcccggatttactcagaagatgggccccagagaggaggagaggaaaggaatacctgtcagtcaaacgtgaagcccactgatgacactgcctggcagagctgcctccggtcagcagtgacccttcaccccccagctcccaagtcctcttcctgagggagctggtccggctttatggaaggctccgcctgtgttcccccactgggtccctggtccctcacctgtcacgtggggcgatggtcaccctccctccctgcctgccctgaaggatacactgagatgaaggtcaggaaatctgctggctgcagaaccaggggccatgcaggagtgagggatggtctggtcaagttgaggctctgccccagcctcagtttccccacacaggcatgagactgtcttcctgactttcagaggacagggctgagatgggatgagggaacacagggaaagcgtttagcacctctgagtgctgtgtggatgcgacctggggggtcctggcctccactctttaattctatctggactgtgtgccctcctacctccagtttccctgcgggggcctttcacagggcctggcttgcggatacggggtttggcgtagggcagtgcttctcaaatgggaaggcgcactgggattcttcaggttggggtggggcctgaggttctgcatttctaatcagttgcctaggactggctctaattcttgttgaatttacaatcacttgtggagttaagaaaaacatactgggccttggttgggtgtggtggctcacacctgtaatcccagcactttgggaggccaaggtgggcagatcatgaggtcgagagattgagaccatcctggccaacatggtgaaaccttgtctctactaaaaaaaaaaaaaaaaaaaaattagctgggcatggtggcaggcgcctgtaatcccagctacttgggaggctgaggcaggagaatcacttgaacccgggaggtggaggttgcagtgagctgagattgcaccattgcactccagcctgggcaaaaagagcgaaactctgtctcaaaaaaaaaaaaaaaaagaaaaaaagaaaaacatactgagccaggcgtggtgactcattcctgtaagcccagcactttgggaggccgaggcgggcagatcacctgagggcaggagttcgagaccagcctggccaacatggtgaaaccccatgtctactaaaaatacaaaaattaactgggcatggtggcacgcacctgtaatcccagctacgtgggagcctgaggcaggagaatcacttgaactcaagaggcagaggttgcagtgagccgagatcgcaccactgcactgcagcctgggtgacagagtaagactctgtctcataaaaacaaacaacaacaacaacaaaaaaacatactggagcctagatcccaccccagactggttgattctgaatttctggggctgaggtacaagcataaagttccctgggaggtcttcacagagtctctggatccctgaggctgtgaatgacccccttccagagccaaaatcaccagggatggaggaggggtcttgggtactggacccaccagccaggcaggttatactggggtatccggagagctttggggtgtggcaggggagggccta

SEQ ID NO: 575 - DNA, 688545 bp, Homo sapiens
  source 1..688545: mol_type = genomic DNA
ggccattgtgaatcgctgccaatgtgagatggattagaggagaaatctctttcttgaaaaacaatgatagttaccatttattgaacacttactataaccagatactgttctatccatttattatctccacaggggattgactcaactgttaggctattggattaaatgatctccataggtccttctggccctatgactctatgagttaggaaacagcaatagataatttgtctggtgtaatgtattttgttggctctcacttccattattttctctggaaaatatcctctatagctataaccgtataaaaagcttaagctcgggtagtaatggttggtctaaccagtgctcccggccagaccctagctatctctgcaagttgcaacattatgggtacaaggggaagagactgtgtcattagggacctgaaatggtagctgcctctatgtagaagcatggaagaacatacccctttataagtctggttgtctgggaacataaacagagcaaaagaacccagatgaaagcatttgactaagggccatctcccttgatttttaaaattctgggttctcagtaaaattgtgagataccttaagactagaaaagagaagtgtctctattgtcttttttaatcctcccagttatctttttagaagttgtccagtcttttgccaaaaatacattccttattactagtaagcctaggctgaaaataagaatttaacaaaatgttgttttctgacttgatcttggggtgtttttttaaactactattttgcatgttcacagcaaagttcttagcgcttgttcattccctcagatccttttttttttcaattaaatagctgggaaaatgtgtaaaactattagctctaggctaaataaaatgaaaaaggtaatatttagattaatacacttttaatgaacattttttgggggggtaacaagcagaggaacaaaaataaaattgctgtatggctgctgcacttcagaaaaagagtcaagtttaatgataaatctggccttagagaaccagccagaatggatagggtctgaataggatttaaaaacccaactgtgtgcagaaattagagttttgcccctgaatcatatggaattacagtgctgggtgcgtgtgccatgcctacacaataaagcccagaggaagcagctatttctgttggttttattaaaccaaccaagcaatttaattcttttgttcaggagagttctacttcattgattaacaaaagcagggatataattttttcagcctttttgaaaagcctgaaatgtcaagccttttaaagcagattattctgcctctgtgcagtgaatacagccagagtaaccttttgtctacaattaaatattctagcataaatataaaagaaaatcagagatgggaaagattgactcacgagagattggagaggtagattcacacagtgatagtgcaagcagcttgcttctaattaaatatgcgactgagtctcaatgcatttgctttcagccgcagagagaagaagctgcccaagaatggaaaggaagaaatatatcacatcatctgtctgtccacaggctttccttggggcttatgaaggtattttagaatttttatattggcatttttcaggggagataaaggtgaaccctcaagggcagtcagacaacagtcttgaaagtttgggcttccttgttggtacactaacctgactttaatagctttcttattagtcaataaccaaggttaatatcaatgactttgtttttagatttgaagccatcatgtatgatattgccagacgtattgctgtgctttgggtgaccttttgttattttgaattggggctacttattgatttttctctttttcgcttactttatgataaattctttaatgcatattttggtatttgtaccttataagtatgaacccagaaagcaaaattcaagtatccttagctatttctaacaaaatgcattttagaaaatgataaggtttgcagttggagacttagctttatttatattcataagcctttcatctttatacatactcatggcattttcagggaagtacttaaatatggcacttataaaatgctgatgacataaaatatggttgatcctcttagggtttgctgcttacacagaaaaatcggaaaataataagaatgaaatttctctactctataactttacctttccatttcagattttgacattactgaaattattggaattactttgaggaactttgcctgttgagtgtcttatatgcacataagaacttttcccatttgcaggtgaaatttgtatttgtttatgaaaataattgattggattgaaacaacatcggaattcagttggcttttagtttgtatatttactgtacttaatgtgccatgggttgtgattttgaatagaatcatagacatcctgtgcattttggaagcttgccactgggaaaggcttaatatttgtaaattaatagtttgcactcctcaaaaagtggttagggcaataattgaatgttagcaataaagcttaaaattttccatcttttgagatttctccctcttttaataagtaactttgtcaagcaacattctctattgaagggaagaaaactttcaattgggtcttaatatactattcacctttccctttattaatataaagattatgtttagtactgtgtttaacaagaaatgtacttacacaagtatttaatcttagctttcttaaggaaataggcaaatatcttagttactaatattaaatatattaaagcttacacataaagcactaaaggatgtcagaattgagaattttttaatgaaagaaaaaatattttgatgattaataaattaaaatgttctgggctgatttatagagaaatattccaccaaaggtatcagtcttcatgtcaacttgcccttcctaacagttctataattatcattgagttttaaaaatgtttaaattggattttcatgtctaggattaagtgtatattatagataaaaatgtagaatatgtatatattttgtattttcatgtgaaatataatctctaatactacataaattgtaatgtattacattgctaatggaaataaaaatatgctgatacttttctgggagggaggttgtttcactgatcagatatttttcctgtgagagggagaacatagtgattaaatactattgctctggcaagaaaaataacagcaaaccaactaaaccaaaaaaagcaagtaaagaacaaaacaaaaaacaattaaaattacattaatgtaacaataatccgtcaaattccacagcttattattgaaattttccatactgagatttatttttgtttgcaatatccgatatacagttgtcttggatatagatttatattttaaagtagttagcatgcagttgaccaagcctttgttcatttgagggagtatgtgtgaagggttagaactaaaggataaattaactctgttgaattatttctgaagttgtttgcttccagtgaaaaacaagaaacatgatttggtaatacatatttaaaccgactcttgctacacattttttcatgttgctcttccacagcttttcatttagctacactaaaacaaaagaggatcaccttacttttgaaaacattatttttagtatatctgaaatcagatatctgattaaattattattcaacaataggcttggattgactttggcattttttttctttgaggaaaaccactgatctgcagaatctatgtttgaaatgacaatttacatatttattattatttcaaaaggcccagaaacttttgcttaccagacagttagagttataacagtgagttcaaattagtgattctggggaatgttttgatactgttttctaataacgaataaactacacccacatcatcacagaaacaaacatacgtgtttctctcatttcattgtcaatgcttggtgctagctaatgcttttgattctatgatcattattctaaagaaaacacttattataacaacagttggtttcttataaaaggaatattttaattcatgagatttttcaatgtagttattaaaatattaagtatttaactgagtagctgtagaaaagtcaaattaattataaattatactttaggttcacatttatttacatttatacctatgatcaatttttaaattatgctttaaattatacataccattaaaagcaaggtttgatcatataaagaacaattcataattaaaattatgcattagaagaataacagaattaacttgaattataatacaaagaatactttgtcacttgttattgatataactaaaaattattttatttaggagaaaacagaagcccttaaaatgcacattttccaggtgaatagtatagaaatactgaagagcaacaactgtattttttttgttgttaatttagataacactcttgctatgaaaatatgtagagcgaattttggctaaacacaagctgaagagattacagccaagttttcactattgggcactacataaaatctttattgcacattttttacttcattacatttttttcttatcaccacctgcctttttattaaaactttaagctatagcattaaaatctttaaatctatactttttccaataactacatcagtatttccataccaattaaattcattgaaaaaataaaaagccttatttaagattatgaaaacacatgttttccatattggcttttatttcaatatttcctttcatgttttccatttctgcggaagtaaggagctggaagggatgtactacttttgcgttagtgccacccggccttggagagtagaataaatgctgctccagcgacaagtcaccattttgaagatgggccagatgtgtggcaatattatggtgggcagggaagtctcaaaataagatgctacaatctgtctatgactcaccagcgtgtgtgtgtgtgtgtgtgtgtgtgtgtgtgtgtggtggtggtggtggtggtgtgtgtgtgtgtccttaaggaatgtttttggccaaatggtgcttaaaaatactgacaatattttacctcagcttgaatcttgtgattatcaactgtagattttcaagaaagatgcaaaaaggcaaatgactcaaagcatatgtaactaatttaggacctgttatcaacaaggaacacaaattggaaatattgctgcattatcctaaagagaaccctgggaaataatcacttaaaaatatatatatatttgttgaactagttggtctagttacacaatggaaatacaagcatttgactttttgttccttctgccattgttgtggtcttccctataatgatgagctactatgctttcctgtgtttactcaaagatacagaaaaaggcattatcctcatttcccaatctggagtgctaaagagatagggtcatggacacgtaaggggtttaaaagatgagatgatggattcacttttatattttccatgcttttactttaatgctgtgattttaccatattaggaaaggtctttatattcaacatgtttgattgacattttcatttcgtgtcttgactctttttgggaaagttattgctagaggcttggagcggggttctggctttcgcaaaacaactgtgagttcatcctcccctgtgtggagataaagaggaagggtcatgagggagcaggttagatttggggcccaaatgcttgttttaggaaataaggaggatgaggggagtagatgtggataggaaatgtaaagtaaatatagggagctttctgagagatgctgcaaccaagagactctcttctttaccccctctaaggtacctgctctaagtggtgtggactttcagtatgaagaagggtcaaatgtattttgctcagaaaattcaatgggttttatttagttttcaaattcaatccatcaatagatcatgtaattatatgctaaaattcaaaaagtataaaaggttaaacagtgaaaacttgttatctcgcgtggacccctcaccacttagttcctttgaaggcactttgttgccttcgaagaggcaacaaatgtgattaatttcttaattatcattaattattccagcgatattttatgtatttctaaacaaattctcatgtatacatattttttcttttacataatattagcataacatacctcccatttgcatcttgttttttcacttcatatatggaactctttccttattcttatgcaaaaggtgttcctgttctatttttatggttgcatagtattctgttttcagtatgcaccataaatcatttaatcagttgcctattgatagatgtttaggttgcttccaatcttttgctcttataaaaaaaggcaagaatcagaccgggtgcagtggctcatgcctgtaatcccagcactttgggaggtcgaggtgggtggatcacttgaggtcaggagttcgagaccagcctcgccaacatggtgaaacctcctgtctactaaaaacataaaaattagccaggtggtggtggtgcatgcctgtaatcccagctactggggaggctgaggtaggagaatcgcttgaagctgggaggtggcggttgaaatgagccgagatcgcaccactgcactcctgcctgagcgacaagagcaaaactccatctcaaacaaacaaacaccaagaatcattgtgcattactggctaggaagtaaaatggtacagccactgtgaaaatagtatggtttctcaaaacgttaaagatataattaccatatgattcagaaattccactcctaggtatataaccaaaataattgcaagctggaactaaaacagatatatctcgtataccaatgttcatagtggcattattcacaatagataaaaggtggaaacagcctaaatgtccatcaacaaatgaatggatcaacaaaatgtggtatatacatacaatgaagtattattaaaccttagacaggaaagaaattccgatacatgttacaatatggatgagtcttgaacacatgctaagtgaactgtcagatacaatgaacaaatattgtatgattctatttatatgaagtacctaggataagcaaattctgtctctatagacagaaagtagaaagtggttaccagaggataggggaaagggggaaagggcagttagtgtttaatgggtacagagttcgagaaaatgaaaaagttctggaagtggatactggtgatgattacacaacaatgtgaatgtacttaatgccactgaactttacattcaaaaattgtcaaaatggtaaaatttgttacatatattttaccagaataaaaatatcacccaaaagtacaacagtgagcaaccatgtacacctgtgattttgcatgtatggagtacattttcttaataaattcctaggatgtgcaaatacatgtgcatttgtaatatagttacttagttaaagattgttagttatctttctaccaattgtgtatgatgctgcctgtttcctcgtatcctaacatgatgtatttaattaaacttttctctctctggcaacttgataggtgaaaactcaattgctctttttaagaacaattaaaggaaacggtgcttgtaaacttctttgagggtctggaattgagatccttatgtgtatgaatggggaagatgaggcgtacttgaccttttagcctatgatcaaatggaagccgtatttgagctgataatgtgaagagctgagtgatatgttgttcgttaattttcaaatggccttaactaaagatgggttaaacagtttgcctaaatgacatatatggtatggtttcaactgtacactttacagtttaaggtaatttcaactttcttcttggttgttaatttatcaaacatttaataataaataagacatagtgcctgcttatgaggaacttacagtgggttgggggagggtacccaataagcaggcaattgcaatatagggtaatattggggagattgtggattgataaagaaatagagtgggtgggtctttatccccaatttgggtgctgagaagaaaggaaaatattttagaaagggccatatctgaactgagtcgttcatcacaaagaggagttaggcaagtggagtgggagagaagagaaagggaagggacgtttgaagactctggaaaaagaaaagacacagtcattgcaagttgcagaggcaagagaaagtatgaaaccttgagggtatcccagatagttggggtgggctgcagcttagaatggaagagttcctctgatgagcacctgcttcctattatctccaaaaagttcagaacttggacatatttggggttctttctcttgtccaggggcatctcccaaatatgtagcttgaaaaagggttttcactttcacccttggtaagactgttatctccatagggttagagagaatatttgtaaatattttgaaattcttttgacaccaggactgtagtatgtgtaacaggcctacctctccatgatccagaaattcgactcctaggtatataacccaaagaattgaaagctggaactaaaacagataatcatataccttgtataccaatgttcatagtggcattattcacaatagataagaggtggaaacagcctaaatatccatcatttagtctccagattttatcacaaaattaaatgctcattttaacaatctaataataaagattctacccgtgcttaaaaacatgccctgctttcttcccatttccttgattcctttttactctttaatttacatcctcttattcctttttcaaaccctcctgaaattccatctgcattaccaagcctttctttgaagtatttcctagttctgtcgttcccctggcctataaatcagttgtttcttctccaatcatttgctgagggttgattctgtgctggatactggataaaatatgctgaggatacaaggatgaacaagaccagtccatgacctcaggttaatattctcggaacattttattacttctattatagtgcttatcacagcctgccttgtattacagaccataattagtctgagcattttgattcatatgtgtagtctgtggccatagcacagtgcctaggacacacaagtgtatgttgtcaagacttttcaattactaatagagagagaggatatttattgagcatttattctgtacactgcacttggataagtactttacagctatctcatttaacttttctcaaaaccttgcagagccagaatgattagttcctccatttcacacacaggaaactgagaaacagagcacttaagttattttgcccaggatcaatcacactgctaagaagtagcagagcccagatttagacccgcagagtctagttccagggcacttggttttggttgtgattctagactaattttcttctctcaccattccagtctacaaggcacacaatcaacagcacaactttagtccatgtgtaattttgttttactctatgtccccaaggttctgtggcctgtgtttgtatgttataataaatatgagtccacagctaggttgcagcatccaggctgtaaactgtagacaacaggtaacatctatatttatctagttttatgtgaagcttgtagactgatgtctgcatttgtgtgagcctttaaatgccatttgatgattataatgaagctgatttatgctgcttaccagatgggtctccaaggctgcttggaaactgtggcacaaaatgtaagggcaacttgaagatagctgtgatatgaccattgatctttagagcttgcttttagcaagtccttggcgtgatttagacaaggccttcacaaacttgttcactgaagtttacctacaacagtggacagtgaagcacctactcctgagatctggcaatgaaacacggaataatcaaagcatgtcattccctgtaagtctccagattttattgcaaaattaaatgcttatttttaacaatctaacaataattaaagactatccatgcttaaaaatgacaaggttttcaagccaggtgtggtggctcatgcctggaatcccagcactttgggaggctgaggtggctcacctgagatcaggagtttgagactagcctggccaacatggcgaaaccccgtctgtacaaaaaatacaaaaacttagctgggcatggtggtgcacacctgtaatcccagctactcgggaggctgaggcaggagaatcacttaaacctgaaaggcggaggttgcagtgagccaagatcaagccactgcactccagcttgggtgacagagtgagactctgtctcaaaaaaaaaaaaaaaaaaaaaaacagacgacaaggttttcaattatttatgatcaaataaaatggaggaggtgtggtgttattttctgcaacccgaggatttgctggcgtatcatctcatcataattcacttggaggagcactggtcaaatgaaactgatgtagtttagaacacgtggtcacataaaacagttgtcataccaagtcagagttaagagggtccacaaggcagtctctgcaaatctgaagtctagtgctgactatcctttaaattgatttatttcaataatggtcatctgatgttcctgtatgtctggacagatgggagctctattactacaagcaatgtgggaccagtgtaacataactaaggagattagcagagtccccctgacccttgtaattctaagttaatctggcttgaaccccagtcttcagtgttccccataatttatttgcattcctaagggcttgttttcttgcagcttcctctgttgtaatgttttgcatctgtaagtgttttgttttgttctttgtcaacctggatgaaaattcagtgcctctactagtttactatcccaaatccactcacatcaaccatttcctgagtttctaactttattgaatgtttgaggacttcagtctctcaatgatttcattaattgctccctcttctttctctaccctgaccttcttttcttctactccttctctcttcagagcaaacaaatttctctctctgtctcatgctgtgtagtttcaccctctcccctgaatccttggccttaagtgacatccctgccctgcaggactcatccaccccaagtgggcctactaaagcattttctcaacaaaggcaattctctcgctaagaggaattctcataccagctgccaggagaataaaatgtgcttcatctaacccccctaataataaagcaacaaaggttgagagtgatttattttcttttaaaaaataaattagaacagactcaaggttatcttggtaataatagcactgtctctctcccctgcattccaatatgctgtcttgaatgggagtgaaaggcatgaagttacagctcgctcaaagggaattgagcataggggtgctatctgtatgttgcaggggacaaaagagcttctctactttgcctgattactggtgagtagttatctagcatctgcttctacatccccaaagtcgaatttacaacctcttaagccaggacatcgtgcatagggcaatactaacaatttagaaaattattctttgtattgagctgattatcagtcttctggagcttccatcctggtattctaactatttcatgaagtcagacctgactaatttgatttgagttacattagtccagcatcatatactatccatcctaaacatacatctgataagccactttcttgctcaaaatgtcttagtggctcaccattacacagagaatgaaatcttagctccttagcagaacagtgtccttgatttttttttttttttttttttttttgagacacagtctcactctgttacccaggctggagtgcagtggtgcctgcaatctcagccttccaggttcaagtgatttgcatgtctcagcatccccgagtagctgggattacaggcgggtgccaccacgcccagctaacttttttgtattttaagtagacacggggtttcaccatgttgaccaggctggtcttgaactccggacctcaagtgatctgcccatctcagcctcccaaagtgctgggattacaggtgtgagccaccgcatccagccgccacttatttttattttgctttcctaagatcgtgacagctccttaacctgcccatctctcctcagcatcctgtttattctccaatggaacttttaccttgaagtctttttttgctatctctagtcagatgagttgttgctatcacttgtcttcttgtcactttagacctgctctgtccaatactgtagccactagtcacatgtgacttttgaccacttgtgatgtgactggtccagattgagatgttctgtaagcgtaaattaaatgctagatttcaaagacttagtacaaaaaacagaatgtaaatatgtcataagtaggttttattttacaccgattatatgttgaaatgacaatatgttggttatattagtttatataaaacctattacattaatttcatataaaaaatcttttaaatctggctactagaaaacttgaaattacatgcgtggctcttatttggcttgcattaaaattctattgaagaatcctgctttaaaccactatatgtgattcaatgctaagcaccttgaattaccactctttgtgtgcatttcagccccagcaacaacagtttaagcagtctgaggtcaggaacttgtaacctgctatattcctcactgctacaaaatttgtcaggtgtgcaatacatgctaatgaaataaaatagaaaacatttctatcagaagaggtcagaaattcaaatgactacagaaaccaggcaggtagcataattatatgaagtaagctgggtttcatagaaatcttgatgtcagggacatgatggggttgggagaatgttggcagggattatagtcatctgaatattcattgctgtgtaaagagacaaccactatgccaccctagccaaattattacataggaatagaggcccgggttgccaaattttccaaaattttgagagaaactggatatttggatctttatgtgaattaaactgattttcatatattgatttaactcatataaattttgtgtggactaagcaaagcaagtcagtggccttgctgcagcctaaaagttgcctaaagaagtttgtgcttctcatctagagggtaaaataaaatttacaataccatactacagaagagtagaagaacaaggtttattattgtggctttgatcaagaagaggctggaatcagaagctcaaatttgcagatcattcaataaactattggtaaatgatatttccaaacactcccaaatactttaagttaaaaaacattcccttctgcagaatttctcaagatgtaagtccttaagggaaaaaaagggggagtttgaagggtctacaaaataagtttattgacaggagtgtgaaactgccaacttaatgcaaaagagaataaaatgtctctcattccacagtttgtaactgcttacagtttaggaaatgaccaaaaaaccccatcactgtctgagttttcagagctcttatgacttgtgtgtttagagaggaagtcttgtggctgactagtttagcacacatgaggtgacaagcttagaatgagctgaatgctggttagaataatgttatttttaaatggcagtatgctgcttctaaggtagattagcattacccctgctttggttttcaattctctgaaatacaaaatccgttctccaagtgatgcaaaagaattctggcttaggatagtattgcatgttgaataaattcttattagtaatttatttttttgtcattttatgatgctcagtaacctgtagtcataacaatatcagaattagcctaccaaagggtcattattctgtggagttggaaaataagtggagatgtaaaattgcactttaatttacattttgttattttccatgtaaattgagtacctgaaatcaaagattctatttacaatattgtttttgaaagtcatccatcatgtataaatgagtagataagaatttctaaagctctcctaagcaaataggaagaaggagcatgttataagacgaatcaacgtaatattttctcttttttttctttaatttttaaattttactttaagttccgggatacatgtgcagaatgtgccggtttgttacataggtatacatgtgccatggtggtttgctgcacctattgacccctcctctaagttctctcccctcatcccccacccccccaacaggccctagtgtgtgttgttccccaccatgtgttctcattgttcaacttccacttacgagtgagaacatgcggtgtttggttttctgttcctgtgtttatttgctgaggatgatggcttctagcttcatccatgtccctgcaaaggacacgatctcattcctttttatggctgcgtagtattccatggtgtacatgtaccgcattttctttatccagtctattattgatgggcatttgggttggttccaactctttgctattgtaaatagtgctgcactaaacatacatgtgcatgcgtctttatagtagaatgatttatattcctttgggtatatacccagtaatgggattgctgggccaaatggtatttctggttctagatccttgaggaatcaccacactgtcttctacaatggttgaactaattcacattcccaccaacagtgtaaaagcattcctatttctccacagcctcgccagcatctattgcttcttgactttttaataatcaccattctgactggtgtgcgatggtatcttattgtggttttgatttacattgctctaatgatcagtgatgttgagctttttttcatgtttgttggtcacgtaaatgtcttcttttgagaagtgtctgttcatatcctttgcccactttttgttgggattgtttttttcttgtacatttgtttaagttctttgtaaattctggatattagacatttgtcagatgggtagattacaaaaattttctcccattctgtaggttgcctgttcactctgatgatagtttcctttgctgtgcagaagctctttagcttaattagatcctgtttatcaattttggcttttgttgcaattgcttttggcatttttgtcatgaagtctttgcccatgcctatgtcctgaatggtattgcctaggttttcttctagggtttttatgattttgggttttacatttaagggtttaatccatcttgagttaatttttgtataaggtgtaaggaagggatccagttttggctttctacatatggctagccagttttctcatcaccatttattgaataggagatcctttccccattgcttgtttttgttaggtttgttaaagatcagatggttgtagatgtgtggtattatttctgaggtctgttctgttccattggtctgtatgtctgttttggtaccagtagcatgctgctttggttactttaaccttgtagtatagtttgaagtcaggtagcatgatgcctccagctttgttctttttgcttaggattgtcttggctatacagggacttctttgattccacatgaaatttaaagtagttttttctaattctgtgaagaatgtcaatggtagtttgatgggaatagcattgaatctataaattactttgggcagtatggccattttcacgatattgattcttcctatccatgaggatggaatgtttttccatttatttgtgtcccctcttatttccttgagccgtgttttgtagttctccttgaagaagcctttcacttcccttgttaggtgtattcctaggtattttattctctttgtagcaattgtgattgagagttcattcatgatttggctctctgcttatctattatttgtgtaaaggaatgcttgcgatttttgcacattgattttgtatcctgaagctttgctgaagttgcttatcagtttaaggagtttttggactgagatgatggggttttctaattatgaaatcatgtcatctgcaaaagagataatttgacttcctcttttcctatttgaatacactttatttctttctcttgactgattgccctggccagaacttccaatactatattgaataggagtggtgagagagggcatccttgttgtgtactggttttcaaagggaatgcttccagcttttgaccattcaatatgctattggcatgtgtttgtcacaaatagttcttattattttgagatatgttccatcaatacctagtttattgagagtttttaacatgaaagaacattgaattttatcaaaggccttttctccatctattgagataatcatgtagtttttgtctttggttctgtttatgtgatggattatacatgtcttcagttctgtttatgtgatgaatttgcattattttgaaccagccttgcatcccagggatgaagctgacttgaccgtggtggataagttttttgatgtgctgctggattcaatttgccaatattttattgaggatttcacattgatattcatcaaggatattggtctgaagttttctttttttgttgtgtctcttcctggttttgggtatcaggatgatactggcttcataaaatgagttagggaggagtccctccttttaaattatttggaatagtttcagaaggaagggtaccagctcctcttcatacctctgctggaattcggctgtgaatccatctggtcctgggctttttttggttggtaggctattagttactgcctcaatttcagaacttgttatcggtctattaagagattggacttcttcctggttcagtcatgggagggtgtatgtgtacaggaatttatccatttcttctacattttctagtttatttgcatagagatgtttatagtattctctgatggtagtttgtatttcttggggtcattggtgatatccccttcatcgtttttgtattgtgtctatttgattcttctctcttttcttttttattaatctagctagctgtctatctattttgttaatttttttcaaaaaaccagctcctggattcattgattttttttggagggttttttgtgtctctatctccttcaattctgctctgattttagttatttcttgtcttctgctggcttttggattagattgctcttgcttctctagctcttttacttatgatattaaggtgtcaatttgagatctttctagctttctgatgtgggcatttagtgctataaatttccctcttaacactgctttagctgtatcccagagattctggtacattgtctctttgttctcattggtttcaaagaacttcttgatctctgccttaatttcattatttacctaggagtcattcaggagcaggttgttcaatttccatgtaatcgtgtggttttgagtgagtttcttaatcctgagttctaatttgattgcactgtggtctgagagactgtttgttatgatttcacttcttttggatttgctgaggagtgttttacttccaattatgtggttgattttagaataagtgccatgtgacactgagaagaatgtatattctgttgatttggggtggagcattctgtagatgcctattaggtccacttgatccagagctgaattcaagatctgaatatccttgttaattttctgtctcattgatctgcctagtattgacaaaggggtgttaaattctcccactattattgtgtgtgagtctaagtctctttgtagatctctaagaacttgttttatgaattggagtcctcctatattgggtgcatatatatttagaatagttagctcttcttgttgaattgtttcctttaccattatgtaatgcctttctttgtcttttttaatctttgttggtttaaagtctgctttgtcagagactaggattgcaacccctgctttttttgcttttcatttgcttagtaaattttcttccatctctttattctgagcctatgtatgtctctgcacatgagatgggtctcctgaatacagcacctcgatgggtcttgcctctttatccaatttgccagtctgtgtcttttaattggggaatttagctcctttacatttaaggttagtattgttatgtgtgaatttgatcctgtcatcatgatgctatctggttattttgcacattagttgatgctgtttcttcatagtgtcattggtctttatattttggtgtatgtttgcagtggctggtactggtttttcctttcgatatttactgcatctttcaggaactcctccaaggcaggcctggtggtaaaaatccctcagcatttgcttgcctggaaaggattttatttctccttcacttatgaagcttagtttgggtggatatgaaattctgggttaaaaattcttttctttaagaatgttgaatattggtccccagtctcttctggcttatagagtttctgcttgagatatctgctgttagcctgatgggcttccctttgtaggttgcctggcctttctctctggctgcccttaacattttttccttcattttgatcttggaaaatctgatgattatgtgtcttggggttgatattctcatgtagtaccttagtggtgtgctctgtattttctgaattttcacattggcctgtcttgctaggttggagacgttctcctgggtaatatcttgaagtgtgtttcccatcttatttccattctccccatctcactcaggtactccaatcaattgtaggttcaatctttttatgaagtctcatatttcttggagacttttttcattcctttttcattcttttttctctagtcttgtctgcatgccttatttcagcaaggtggtcttcaaactctgttatcctttttttctacttgattgattcagctactgatacttgtgtatgcttcacaaagttcttatactgtgtttttcagctccatcaggtcatttatgatcctctctaaactggttattctagttagcagctcctctaaccttttatccaggttcttagcttctttgcattgggttagaacatgttcctttagctcagtgtagttttttattacccatcttctgaagtctacttctgtcaatttgtccatctcatcctccatccagttctatgcccatgctgagagatgttgcgatcatttggaggagaagaggtactctggctttttgggttttcagcgttttcacattgattctttctcatctttgtgagtttgtctagtttcgatctttaaggctgctgacctttggatggggttttttgtgggggcctttttgttattgatgatgctgttgttgttgctttctgtttgtttttcttttagtggtcagatccctcttctgtagggctgctgcagtttgctgggggttcacttcaggctttattcatctgattcactcccacacctggagatgccactcaaggaggctgcagagcagcaaagatgtgtgcctgctccttcttctgggactctgaccttgaggggcaccaacctgatgtcagtaggatcactcctgtattgggtgtctgacaacccctgttgaagggtctcacccagttggatggcacagggaacaggacccatttaatgaagcactttgactgccccttggtggagggggtgtgcttcactgtggggaaacacacttgtctgggctgcctggattcctcagaactaccaggaggaaaggctaagtctgctggtccacagagactctgaccacccctctccctagggtctcaggctctgggagaccctggttctgtccctgagcctctggctggagttattgaagttcctgcagggaagccctgcccggtgaggaatgaggtgtagagtcaggcctgaagaggcaatctggctgcagtctgccaagccaatgtgttgggctgtggaggacacatcatgggaccaagccatccagcctccctggctccagcaggggaaaagcatggcctggagctatagagatgaatgctgccctcccctgacccagggagcttagcatgttaggcagttgtgagtcccagtgctggctgctgcccctcccccaaggagctcaagctgcttagacagcaggcagctacagctgtggtgcttgttgcccctctccctggaagctcaacagctgagaggctgttgagaatctgtgcagcttgggggttgggatgctaggccccaacagcatgggttcacaagtgggatcttctgatccgggggttgcacagttctgtggaaaaagcacggtttcctcagttgggtagcatgctcactcactgcctcccttggctgggggttaggggctcccctgacccatgtggctctcaggtgggctactgtaccacacttctcttccttcctctccatgtatatcgcaccagcctcctagtcagttttgatgagagaacttgaataccttggttgccggtgaaggattcacatgcttactctggttcttttccatgggagcctctgattgctgctgtttctagtcagccatcttggccctgccctccttcataatattttctttacccagacaaattatactgtgtattaacagctaagaacagttagtaaagaaatttgacatgtattctgattgttagttgagtaaatatcaatgagttgaaaattcattctgatctgtggctagcctttgatgaagttttaaaatctttctgttcctcagtttcctcatctttaaagtagttgtaatgatcccatttatctcataagcataatcatatactggtataggacatggtgagactcctggaaaagtgttctgagatatgagcagatggatgtggttgttatttccatagtatgttagtaagacaaacatgttacaagaacagcctgggttgctttatggcatcttactgtttacaaaattaaagagcagctgttatattattatttagccccacaaacttgttattaagattagaataactacacaaattaagatgatcatatataaactatatatttgcataaatgataaaataataatggaaatctcttaatgggaaagaaccactcagacatctaaataacaataaactgtcattttctatattcccttccagttctagtccaatacttttgacctttttagattagaatggtagaggaggaaaagtaactttttcctcaaccctcatgggttcttagttggaatgaatccccataacaaaagacagattaactagagaaaaacaaacagaagtttactaatatatttcgtatatatgtgggagatacctaggggctgagtaattctcaaagaggtagttttgaattctagcttatatagcatcttcagcaaagaatagtaaatttttagagtagtgacagaacaaaggaagagaactgtgtctgtagggacaggaaattgtgagaaggcaaataaatggcacataagggctagttagtaaatcttgttcatgtagagtcatctgatgccatctccaggccaataagagtctaaaattgtcttcagtgcttaacctttgtcctccctgctagagaaggggggagggatactcttgtctttctaaatttatatcctgcttttaggcaattagaaagcagagagctttcctgccctctcaattgccttgggttcaaaacagtccttaagccaaagaagcatattttggggtggcatgttcttgtctcccacataatcataatagagataaaatttactactctcttttgtaacaatatactctatttccccatattttgcatagtttttcaaactgccattttatatgactgtgtaatgttccattagatacaagtattataatgtacttgaccatattcctattgctggtaatctgtctttatctaaaaaggagtaatgaaaagttaaaagtgttccactgtagctggtagaaattggtcaatgatgaggaaaggctgtaaagtgtcactttaactctggggtcttgtacataggagtgcagctgaggacagtaagtgaagatacagatttgggaaatatcagcacgtagataagtcattcaagacatggggacttgaaatgaggcaggattagtgtagatagttcaaagagtaactgaggacaggaatctaaaggacagccacatttaaggacaagcagagggaacaaagttcaaaggagatgaagaaggagtagtcagaaagaaagagtaatgtcacagaagcctgctgaggcctgtgttagtctatgacttacacaggggcagaactgactctggaatctagggctattgatttcaactccaggtagagttctcccaccttgtaggtaggcacgattctctcctttaacactgttttctacctggttcccatcaaggacaggatgccttcagctacagatctgttttgattcctttaaattgtgttagtctctcaatttaaacacataaacaaagtctaagaagggacagcttggtataaaagttgttttgtgtatttctactggtatcttacagcagtgattggcaaaaactggttcaaggacattggaagttcagtttcagtagccctaaattggggtccaggcttttattttttaatgatttcccaggtacttctgatgaacattcaggtttgggaaactttggcttatttatccgaagagcataaaatcttcacagaagattttagaatgggacatctagaggtttgctataccaggagtaaagagatgaagcatagtccaattttcatgacaacttattctcataaagaagtggtccagagcacttgtatttgcagatctttttttctttgttcagaatattaggcagggttctgaggaaattgaaaagaagacagcatgaatgaatgactgaatgcactcaatctatagagggaatgagatccccagatagatattaacagaaagaacatgtttaaagataatcacagccagtgggaaaggcagagtggtatcctctgagggaggagccttgcaggctccctcacttgcatcctgttttcatttcttggaccgcttcatggaaactgtgtgttgctgtggaacatgccttggacttggcatgagatgccttgaattgaatgtccacggatatggtttggctctctgtccccacccaaatcttttgttggattgtaatccccaatgttggcagagggacttggtgggagatgattggattatgggtgcagatttcccccttgctgttctggtggtgacagtgaattctcatgagatctggttgtttaaaagtatgtagcagctgggcgcagtggctcatgcctgtagtcccagcactttgggaggccaaggggggcagatcacctgaagtcaggagttcgagaccagcctggccaacatggtgaaacactgtctctactaaaaatacaaaattagttgggcatgttggtgtgcacctgtaatcccagctactcaggagactgaggcatgagaatcgcttgcacctgggaggcggaggttgcagtgagccaagatggtgccaatgtactgtggcccgggcaacaagagcaaaattccatctccaaaaaaaaaaaaagaatgtgcataacacttccccttttgctgtctctactaaaaatacaaaattagccaggcatgatggcgcatgcctgtaatcccagttacttgggagggtgaggcaggagaatcgcttgaacccgggaggcggaggttgcagtgagccgagatggcgccactgcactccagcctcagtgaaagagcaagactctgtctcaaaaaaaaaaaaaaaaagggattacaggctaactgtaacaaacagaacaatcagatcagattaatgtctagattcttgggtcttatgtcctaataaacaaaaggttagtactgacaatatgatacgtaaaagatatgtctatgacagctaaggtgagacagaagcaaaatagatttattgtagaaagaaatggcacaagaaaacattggcatgcaagtgcttttgataaccatctcttatgagatttacaataaatagcatctttggatttattttgaatatgaaaaaaaaaagaacgtactttgtaatattctccccagcccttaagaaggtactttgtaatgttctccccgcccttgagaatgtactttgtatgcctatcccaaacctgtaagaactaatgataatcccaccaccctttgcttactctcttttcggacctagcccgcctgcacccaggtgattaaaaagctttattgctcaaaaaacaaacaaacaaacaaaacaaaacaaaacaaaaaccaatagcctcttccattgcctctttacaggcacactacccaaataccatcactttaaacttttagctaagctagaaatatgaccttttaacttaaatacttatctttactccttttgttctaagggggatgcttttgattttattataaaagcttaggtgttttaaaaatctttcgtttagtcttatttttccctttattttatgtggccttttagaaacaacaggtgtttctttgtggtgaagtttgccttaattaattgagtgaaaggagaggaaggtgacttgttctggtagattggacagactcaggaggctctttagctagcattgtaacaaaccgtgttctatttgatgaatggatggatcttatctatttagagtcttagctagatggaaagagtaatattgaaagactatgccttaaataatatactggagctaaaaatatgaatttgagtgtctgatttttttccattggctgagagtttaaattcataagtactctatcaccatttttcattgtcagtgatttcctggagactttagatttaaggcttagttttgccatttatttttaggtctctgccaatttgtccattaaattaataacatcaattttaagcttaagttcaaatgcatctcttaaaatatgaatactattctaattttctttggtcagctcaatttcagagcctttagtggccctcactgaaggagttaagggattagaaatggaactgggaccaagacaaggcagatgttcccctgttatcaatattgaatgttgtgtgtagcatgctgtcttaagagaatatattatatatattttcccttacacgcacatatgtgcatgtatatgtacacatacatatgtgtgtgagtgtgtatacaaaaaaactatcatagaacttccttactttcattttcatagtagagtcattttttcacgttggaacatacaaatttatcgtattcttttaaatagctgcaaggtatttctttggatgaacatgacattcatttagtaagaaatatttattgagcttattgggaagctgaggcgggagaattgcttgagcccaggaggtggaggttgcagtgcgctgagattgcgccactgcatgccagcctgggtgacagagtgagactctgtctcaaaacaaacaaacaaacaaacaaaaactactatatgatccaatctcacttctgggaatgtattcacataattgaaataaggatagcatccctatattcattgcagcattattcacaatagcgaagatgtggaaaacatctaaatttccatggacagatgagtagataaagaaaatgtggaatatatttacaacggaatactattcagcgttaagaaaaagaaggaagttcagccgggcgtggtggctcacgcctgtaatcccagcactttgggaagccgaggtgggtggatcatgaggtcaagagatcgagactatcctggccaacatggtgaaaccttgtctctactgaaaatacaaaaattagctagatgtggtagcaggcgcctgtaatcccagctacttgggaggctgaggcaggagaatcacttgaacccgggaggaggaggttgcagtgagccgagatcgcgccactgcactccagcctcagtgaaagagcgagactctgtctcaaaaaaaaaaaaaaaaaaaaaaaaaaaaaagagattacaggctaactgtaacaaacagaacaatcagatcagattaatgtctagattcttaggtcttatgtcctaataaacaaaaggttagtactgacaatatgatacgtaaaagatatgtctatgacagctaagatgaaacagaagccaaatagatttattgtagaaagaaatggcacaagaaaacattggcatgcaagtccttttgataaccatctcttatgagacttataataaatagcatctttggatttattttgaatatgaaaaaaaaaaaagaacgtactttgtaatattctccccagcccttaagaaggtactttgtaatgttctccccgcccttgagaatgtactttgtatgcctatcccaaacctgtaagaactaatgataatcccaccaccctttgcttactctctttttggactcagcccgcctgcacccaggtgattaaaaagctttattgttcaaaaaacaaaacaaaacaaaacaaaacaaaaaccaatagcctcttctattgcctctttacaggcacactacccaaataccatcactttaaacttttaaaagtgttttttttctggtattttgtaaacatgtgcttatgttgcaatctcgtgtttttttcagttaggcagtctgtttcctgtttgatagttgtaggtttgctctttttccttctcgactcctcctattataattatattatatttattgctgaagtcaataatcagtttatcatattaatactatctaaagattgttcaccactgagctaaaaggtatgctctgattatatttcttcttttattcaaatcttagtttttcttcaagtaaacaaagtaggccaaatccggcctgtcacttttctttgcaaataaagttttattggaacacaggctcattcacttacttattgtctagggcagcttttgtgatacaacagtagaactcaatagttgtgatagaaattatatggtctgcaaaacttaaaatattactctctgaccttttatggaaaaagtttgctgacgcctatgctacttagtaatgattgcactttttcattttctttgtttatgtaatttattaaaatttcagttcaaaatattttaaaatttcttttgaaatttacttgaaccattaattatttatctaagtgtggtgcttaactttgcagcatttggagattttctgttaatttttttggtaattgatttttatcttaattctggtatggccaagagaacataagtaaataaattctaatctttaaaatgtattgaaatgtgttttatggaatgatatgtggtcaattacagtaaattccctacatatgctttaaaagaatgcatattctgcagtttttaggatcaatgttctatatatgcttgagggtcgatttcttaattgcactattaacattttctgtattcttactgatttttgtttatcagtttttgaaaaaggtacgttaagctctcccactatgattgtggatttgtctatttttccttaaaattgttgtattttaaaaatacactttgaggttatgcttttaggtgagtacaaatttaaaattgttatattttcctggtgaagtgacttttttcattataaaatctccctctttacctcaagtaattttaattatccaaaaacattagtataattttttcttgtgtttaaattgtattgtatattttttccattctttcattttcaactattctacatgtttatttttaaagcatatctcttgtaagcagcttatagttgtatctttaaaataaaaattcagttgataatccagtttaattacaaaatattaatttaatttacagttgaagtaattactggtatatttatttaaaacataccattaattttttcccctttactcacttattctatgtgcttgaattagtcattattgctgcataacagattaacaacttacagtcttaaaaacaacacacatttatcatttcacagtttttgtgagtcatgattctgggaacagtgtagctgggtcctttgctccagggtctctcacaaaactgcaaattaaggtgttggctggggctgcagctatctttttttttttttttttttgagatggagtcttgctctgttgcctaggctggagtgcaatggcatgatctcagttcactgcaacctctgcctcctcgtttcaagtgattctcctgccactgcctcctgagtagctgagactacaggcgcccactgccacacctggctgatttttgtatttttagtagagatggggtttcaccatattggccaggctggtcttgaactcctgaccttgtgatctgcccgtctgggcctcccaaagtgctaggattacaggcatgagccactgtgcctggccggggctccacctatcttaagattcattatcaatctcatgtagttgttggaaaagattttaatattcttttgtagttctgtaagttgcacttgattctttgtcatagatatcagttctctggcaaactttttcaccttgactcttattttcctaaacgtattaatcatagttactttaaagtttgtgtctgataaatctaataaatgatcacctgctcgtctgtttctgttgtctagtttttttggtttgatccttactcttggtattataaattatagagtttctggatgattttcaaagatgattttctttagtttccagcatgcacttatagtagaagcagatcactttaaccatactaatatcgatgttattgggagaattagaatttggactgtagcttttgtaagatctggttaccacttcacccttactaatagagggtaattctgcaggagtgttttctgtataggaaactcagaaactaaattataaatggagggtttcatggaaatattaaggatttctaggctatgtgtttttaagtatgcacttatttacctaaggattatccaaggccaatattgaatttgaagttggactctcccagcctctgaaaggcttctgagaatttctcccctcccaccaagttgcttacattttccgaatagatattaagtctaatattagactccagaaacaaaattgagaaggtaaaactacaaccaaggatgctaaataataatgtaaatttctggcattaaatatgaatgatatatatattatatgtgacacagtacaactgtggacataattaagaacattcaaatttttaccatgtcagggtgaattttacagaactgccataatcatcgcctctcctttttcacacacacttgtgctgctgttgagggatggaggggccttattcacccagaaatgctctaggtgccctcccagtcatatgcgccgcatcaaggttcttgggaatcaacaggaagtaagtcataggaatcaatacaggagtctgtattgaagtctgaaacctgggttctaatcctggctctgcttctaattatttggatagtcttgttaattcatttagcttttaaaaaaatacacttttaaaaatagcagctttagttccacagcaaaattgagatgaagatacagagattttccatatattccctggccccacacatgcacagcctctcctactatcaacatctccactagagtagtacatttgtcatagttaaccaacctacattgacacatcataatcacctaaactctgtaattgacatttgggttcactataggtgtacattctgtgtgtttggttatgtatactgccgtgtatccagcattacagtatatagtgcagtttccctgccctaaaaatcctttgtgttctgcctcttcatccctctctccccttcccaaactctggcaaccactggtcttttttactgtctccatagttttgcctatttcagaatgtcaaatcatttagctttaaaaagttttgtaggactcaatattttcatctataagtgaggccaatgatttccatcctaccttccccggctggtagttggtagtaccaagcatgaaatgtgaaaatgcttcacagtcagtacaattctgtgtaaatactgttgccaccacgatgccatgatgtcactggtatttcagaggaggagacattttttttttctagtagctctttaaatgcttgtactcagttgtgtgagaaaaggaaattttcagaaaaattagcctggtggtttgccattggtttgtttcaaagttagtagtatttgttctgttatcctttagtttttctttgaaacaagtcctgatcactcgttaatgatctcttgtagtattttggtggcaaatttacctagttttgtggggtttgacttagaatagccttttggtaggctctcaaaactgttatgattgcttccaaaggctactctccctacaggacctgattcaaaactccctgtgtgctaatgggacctgacatccacgtcacaggaagtctctcctccccactagacaaactcaatcatgtaggtcagaacttcctaatttgagtgggcatcagcatcacctggagggcctgttaaaacactgattgctgggcaccacctaactattcccatttcagtatgtctggggtgcaggtccaagaatttgtgtttctaatgggttccctgctggtattgatgctgttggctcacaacctggggagggtttcttaaagtgtttcaaaggactgccttgttcagaaactcctggagccaatgtgaagcctggatttcactagggttataaatttggggcttggaagaagatattgtagacatatgacattaatgaagttctctgacctatttgagtggacagtttgacagtttcacattgtgtgatccagggaagtcacactgtgagcttagtgaccttgcctcgtcaccacacccctaaggtggtgacacaggactgtttgaggctggaagagatcatggacacgagaggcccgtgtaaacatgggggtgcttctccaggactgggtgttcctgtttctaacaaatgttattatgggactgaaggggagagccgagttcagggccatccacagggaacgcagagctgtcagtcacttccttacagaaacagaacaatacacactgtttatttctcttcagtctgtgggatttttttcaacatcgattttacacatctggttctgagaagaatccatactgttaccattcacctggccaccctaactgtaacatttcagtgtttggggaattctaacaactgaaatcaatggcttttttgatccagcagattcttccatcttcttaatcttgctgcatccccctctcacttggcagactctgcctgagccctcacactgctgcttccttcacatcagtggactttccagcctcttctcttcacactggccctttaagaagacatttaaagcaattattcagttcagtttcgttatattctgctctcagagctactgtaatagcgtacttgaaagaagctggttgtgttgaattttgtgtttgctttccagttaccggaatggcaccttcaccccttctcatctctgctcattttattatttacctgaatgatttttctgtttcaagaaagcaagtggaacatgaaaggccaaatatttctgtctgttcagttcaagaatttttcagtcaatggtctactgttttaaagtatcattgcaaagaaaattgagaccattaatcttctctaaaacatcttttgtgttctaataaacatatttttccatttcttagtactttacaattctgattgcttttgattatatatttgtagagatatttttttctgaaaagtaaaaagccgttaaatatatttattttcctctttcttaaggaagtctctgatatagtcacacccacacatgaatgaatgaacaattgggaatgactgtcccagctgggacgccactggaattttcttacctttccaatttcctttccttgatagtgcccttcccactcaccactgtagacccaaaagctatttgtggagctttcccaaccaaggggagacgagctcctgcttcctgatctaactttaatgcagtccagggcaagatttgataaagggatggaggggtagtcagcctgatagtagcaaagaagaaggaaagaggaggtggtccgaaagaccattcaatggtctttccacttactgctgctttggttccagcatcatcttattctgagcctctcctatgtctactaagtcctcattctggaagctcctgctccagcacttaccataatacaggacacctggtgctttgtgtactcactgcaaagaaactgttactccattcatggcctatcaatggtacctaagtagtctatatctttatagctttagatcaccatggtggtcttcagaaagttcatggacctactgaaacaaacaaggacttgtttgaatattcatttgtgttttcctgggaagacagtccacagctttcatcagattcttatagagccatatgacccaaagatattttaaaagatgaagaagtaactactgatgtggtagtagaaggcctggagacagtgtgcaacaataaatatttattgagcacctgcaatatgccaggtactgttctagactcttgatatatctatgaacaacaacaaaaaccccctcccaaatccttacttcatgaagtttacgttgcagtgggtagagaaagacaacaaaccatatacacaatacttcacacacaatatcggagagtataagtgccataggaaaataaagcagagtgagggggatcagggatgaggtgggggagaactgtgatttcagggtagacctcattgagaaagtgacattttagtaaaatcccgaagagggaaggaatcaggtggccatatgagggaagaatgtaccaggcagagggaacagctagtacaataactttagggtgggagcaagcctggtgtgttcagagtggtggggtggagtgagtgagacagaggggcaggcagtgagtcagagggtatgtggagtgggtgcgtggatgaatccgggtctcatatgcctctgtgcgcgactctgggagccccttgaagaactttaagcagaggagagatatgacctgacttagggtagattcggatcactctgatgtgttaaaaacagactaggggttaagggcaggagcagggagactaggctgctttgcagtcatcccgggaagacaggatgatacagcatggacagaatggtcacagaggagtcctgggggctgggtagattttgaatatatttggaagtagatccaacaagtttgctgagaggtcagatgtgaattgtcagagaaagagagagccaaggatgactctaagactttcggcctgaacaactaaaaggatggaattaatgggaaaaactagggattttaggtcagacaggacatggatctcagttctgccatttactggctacattgtgacctgacttatgggcaagtaacttaacctttctgaatctcaatgttttatttgcaaactagggacaatcattcctatcttgtaacaatgctatgaggagttaatgtgcttggggtatggtccattgaacagatgctaatctctttccacaattttcttttagtgaatgaaggagggaagaaaggagagacagagaaaatatgggtgagtagtgtctccatctgagatttttttctcagtaagatcatgtctttttggctccattgtctaaatatgttttatggtatccgaggatttatctttccatcagccccatgttttctcctgccaggttcctggggatactaacttagggttcaatttattatctttgacacgttattttattatttatcttaaaatatgtttttatagtgaagaagaaattctcacctgatactatccattatccatgcatactgttcacaaacaggcatagccaataagtttattgggcttcattgatgaggctattggtgtattaaacattttatgtcaggtagaaattcctgttgagttattacatagccatttaagaatgttttactgatatttggtatgattagtgaggattttttatgggttggcatgattattatttttcttgtttaagacactgaaatatggtctaccactatctgattaccagttaccaaacatgcttgcaggagtagctagatttgggataacaaagtatgccaagattgggaattcaacaactgaaggaggagtgagtatgaactgattgggttataagaatacatgcttcttctttgattcaaaatccctcaatccaaggcatttcaatgtttctgaaattagagtatgttttatcacctatatatatatatatttaacatgataacatttctgttagggtttttggtagattccagattccttctctaccccaattcaaaaccaactgaaaaataaaacaaaaaatattgcagatagagaataaatctgccagtgttatcagcaatagattggcttagtttgagtattctaagcagtaacaatttcctaggttcttaggttgatgcctcctactgatctggatggagaaaaaagcagaatgaaatttaatcttccctgcttgggacttggcttaatttgctttactaaattgagatttgttgtccactggctccagtctcccaactggctagctaactccacctccagggtgtgaaaggagaggctggtcccaatccaggagtattgaatttttcctcgctagtgttataggtgccacagagtcactctgagtccttaagagaatgtgatggcacctcccctttgatagggatgtggcttagtgtctcctggaggccctgaggttagccaatttttttatggtaggggggatggttaggtaggggctttgttttctaggaaagggaatgtgattcctaatattttatgttttgagtatctgaaaagagatattgtctgtaaagaggctctggaagagaagatgggaatgaatgagtactagatttttcctttctgcttttggaaatctaggctcagtgccaagacatacttactaggagatgaaacatatctccagtggtataattatttagcacatgacacttataaggagatcataggaacctgtatgcatatagtctgggggagggatctgtggttaaaagggtaggtaggggaaaatgtaaagatatatgcatagtttagcatttacttatttatttattaatttttactttattttcaggagtacatgtgcaggtttgttatataggtaaattgtgtgtcatggggatttggtgtacaaaatattttatcaccagggtaataaacataatatctgataagtagtttttcaatcctcaccccactctcaccctttaccattaagtaggccctggtgtctgtgtactcaatgtttagatcccacttataaggaacaatatgaggtgtttagttttctgttcctgcgttagttcacttagaaaaatggcctccagctccatccatgttgctgcaaaagacatgatctcattctttttcatggctgtgtagcattccatggcatatatgtaccacattttctttacccagtctaccattgatgggtatctatgtcgattttatgtctttgctattgtgaatagtgtggtgatgaacatatgggtgtatgtgtctttatggtaaaatgatctatatttctttgggtatatatccaataatgggatttctggattgaatggtagttctattttaagttatttgagaaattaccaaactgctttccacagtggctgaactaacttacattcccaccagctgtgtatgagcattcccttttttctacaacctcaccagcatctgttattttttgacttattaaaaatagccatcctgactggtatgagatggtatctcattgtggttttaatttgcatttctctgatggttagtgatgttgaacattttttcatatgcttgttggctgcatgtgtgtcttcttttggaaaatgtctttttatgtcctttgtccactttttaatggtgctgtttgttttttgcttaatttgtttacattctttatggattctggatattagacctttgccagatgcatatatgcaaatactccctcacattctgtgagagatatttctcccctctgagagatatttctttcattctgtctgtttactctgttgatagtttcttttgctgtgtggaagctctttagtttaattaggtttcattcgttagtttttgtttttgttgcaattgcttttattgtcttcttcatgaaatcgttgccagtgcctatgtccaggatggtatttcctaggttatgttccagggtttttatagttttaggttttacattcatgtctttaacccatcttaagttgatttttatatatggtgtaagggaagagtccagtttcaatcttctgcatgtggctagccagttatcccagcaccatttattgaatagggaatctttcccattgcttatttttgttaacattgttgaagatcagatggctgtaggagtgcagcattgtttctgggctctctattctgttccattggtctatgtgtctatttttgtaccagtaccatgctgttttggttacagtagttttgtagtatagtttgaggttgggtgatgtgatgcctccagctttgttcattttccttaggattgccttgagtatttaggctcttttttggttccatatgaattttaaaatagtattttctaattctgtgaaggatgtctttggtagtttgatagaaatagcattgaatctgtagattgctttgggaaatatggccattttaacaatattgattatttctatccataagcatagaattttttttttaatttgtgtcatctgtgatttctttgagcagtgttttgtaattctcattgtagagctcttcacctctctggttagctgtattcctaggtattttgttctttttgtggctattgtgaatgagattgtgttctcgatgtggctctcagcttggatgttgttggtgcatagaagtgcaactgatttttctacattgattttgtatcctaaaaccttgcggaagttgtttatcagatctaggagcttttgagcagagtctatcgggttttctaggtataatttttttttttttgcattcaaaatacagttgtgaacagatacggcttgattatttttactcctttttaaaacaggaaaaaaattcaagcagtacaaaagagaataaaaatatctgccttcaagctctttctctgaaagttcccctctcaggtggaatcactattacctttaatcactgttaggtttttgtgaatccttccagagatatttgtgcataacaaatattttgtttgttttacacaaaaggataagtgttaaagatgcttctagaataatacattgggtggtccttattaaccttataagcatttatgatacatgacctcaatataagctccccatgtggtacttgatgataagaaaaaaactttttattacggatacagttacaaaacttaaaatctgctaaagagaaaataatttaagaataatggatattgaaagggccatcacttgtaccagtgtgttttgaagcacatattttacatttgtttttcctacagtgtctctgtgatatgctttcctggttaccaggtaatagacaaaatgagaataaaactccctggagaactgaaatggaattgtgtgttattgcagattttctccacagatggcattcattgtcaccagtttccttagggcaatttggaaactcagaggccctgaatataagagataatatatatttactgggtagctggtactttcctctaagtatgtctttatctacttataattatggtatactgtcttctaaaaactgaatttggaaggtaaatgatagagttaatttattagaaatatgcaacaaatgtataaatgtataaattctggcaggagtgctgtgagaaagaggtataaagacagtgatatttttgaaaaatgagaccttgttcttaagagcaagtcaaaacacaagtctcacaactctacattccgtattttttggttaaaaaaatttcccaaccataacaacaaaaagcaggtaggagctgggtgcagtggctcatgcctgtaatcctagcactttgggaggctgaggtggggagatcacgaggtcaggagatagagaccatcctggctaacactgtgaaaccccgtctctgctaaaaaatacaaaaaaaaaattagccgggcatggtggtgggcacctgtagtcccagctactcaggaggctgaggcaggagaatggcgtgaacccaggaggcggagcttgcagtgagctgagatcatgccactgcactccagcctgggcgacagagcgagactccatctcaacaacgacaaaaaagcaggtaggagtggggaagtcgcttggagaaatggaaaatgctctgcagtagaaatagacttgaattgttttcccagctttccttgcacatgtacatccttgatcttgaccagtttttcaatctcttcaggtgtcagcttttctttatttgtcaggctgagtagtaatctctcatgttctttcaaaatccaacattctatcatcttaggaaggaacttcaaataattcattctctcttcatctcaataaaaactgcatttgacattgagattcttgttcgataatctattaggtcaagattgttaattgtattcttcaaatccttcatattccttatatcccttctaatttaatgtctgcttgttctatcaactattgatagaggtgtgttaaaatctctcactatgattgtaggtttttccacttctcttttcagttctttgtacgtatttaagctaggttgttaagtttatgcaaatgttcaattgtttaatcttcttggtgaattaaaactttatatatgaaatgtgtctcctcacctccagtaatgacttttgcgttaaagtctgctgaactgactgatttggggatatattaatgtataagatatatcaattttggggctcacatttttgcatggcatttattttttcatacttgtactttcattgtttctatattcttatgtataagatgtgcctttgtaagtagtttatgtttttgtccatttctgcttctataacaaaatatctcacactgggcaacttagagagaacagaaatttattttcttatgatactggaggctggaaagtcgaaggtcaaggcaccggtagatttatttctggttagggctgctttctgcttccaagaaagcacatagtggaattggcaaatggtgtgtcctcatgtgacagaatcaaaaaggcaaaaggggccacttagtttcctcaagtccttttatatggatactaatcccattcatgaggggaaagcctacatgagttaatcacactctaaaagcctcaccttctaatagtatcacattggatcttacgttccaacatgtgaatttggagggacacgtatattcaaaacataacagcttatgtttgtgtgtttttggaagtctgctctgacgttttttaattgaatgatttagttcatttacatttattctaattagaggtctaattaagtttctatcttactatgtgttttctatttgtatcatgtactaagtactatatatactaagctagtgttaattctttttttgtgcctcttttttattgagtattttaaattatttttacctttattatattagtagttatacatacttttactcccctttaatgttaaatgtagctattataacatgcaactttgatttactaaagtctaatataagttttgcttttaccactttcttggcaatgcaaggatcttagtatattttaactccattaaaccttctttcaacttaccattttcattgttatggtttatgttttatacctctgcacttcaatctgggaccttttattagcctaaagaatacatttcagtatttctatttttaaaagtttgctggtggtgactcaattttgtctgtcaaaatctcatttttcactttaattcttaaaggatagtttgctgactatagacctctagactggtcgtcaattttctcaatttccacaaagtttggacaaaaagtagctggtttaagttgtaacaggaaagttaaggaaaggttcttgttatagaaattattgaccatgatgcagaatgtcttacatcatattctacagacttttagttccatgagcttccctaagaaaaaaaggactccataacctcataatctcatggaaacatgcaacctctgtctcacttgttggaattcactgtgcattttagaccttgaagaggctgctgttatgaaatccatttaactttgttattcagcattccacaaaaatatttgattaggaagctattgttctgggtaaacactaataaatatttcaagcatctggtgatataaactgtgcattttgggaatgcttctttaagggcttaaggactctacagctctggggtgcaaataagaattccttactgtgtgagggttttgttgttgttgttgtttgtttgtttgtttgtttttaaagtttaagctattctttgtcatctgaatactttaaaatctgttgttccagtttctggctatggataaagtcttccatggaattcagtttcatgattgctgtcacaagatagcatgactagtaaatacaaccagttctgatgcaactaggtaaagcccttataaattcagatttgcattcacttaaagacattcataatctgtgcagagaggggcatcttgataaccctcatgtcacatttttttgtaaaataaataaacaggaaattatatttactgtactgtgaggacttcattaattcaggaagggcatgggggagacagtaaatcaactttatctaaaaatctggtgggatttatttataaaacaatatattgcttcctgaatttttttttttttttttgctcagacacctgtgaccctttcatttaagtcttcatgcaaaatgggacattttcctatcatcttgctctgcttccctttctgtcttcaagcccagctggcagtaaggtctgatactagaaattaccactaaaaacaccccaaacctgttgtatccatcagatcctatagagaaagcagagaatctcagactagatgtacatggacagtgttgctggtgaccttgagtgattagaggatctaagaaatggctttaggcacctcaaccaacaaaagagctgcctcatatgtcaaaatgtgccagtgtggcagccagtagcttccaggctctcttctttccttgagaattttcaaggaactcaggaagcaagcccttgttgcaatccccttcttatctttaatgctgcacacatacagctctgacacgcattatattattagttcctactttctcaattttaattaaaaacagaaatgaactattttaatctaccgtttttaagagtcagcattattgcatgtgattatccactgaaatggggttggcacagaaaaataatgatatttaaaatattatctctactgttttagcttgctctcccagcaaatcttaatttactccaaaaatctctttacatgtgatcctaaataaataggcatttatctagtagatcaggaatctagatgttaacctttcaagtgttatttgagctgtcttctgtcatcataaaccttaaaatcttttggcatttacaactgtacagtttttttaaaatcccacatacaaataagatagtttataagtagagtggttatcaggctctgtgttttgcccaggagagtcctagtttatccctactgtcctaggccaaacatgaatagtaacctctttcactttcagaagtgtcttggtatggagaataagttatatggttaccctgtttaaaatacgatttaatccaattataggaattattatgaaacaaagaattagtcattttggtacttaaggaaaatggttgtttttgattcatccataaacactttcaactaagtccatggttctgattgcacatcagaatcacatttataccactcatagaccaattgcatacaaatctctgggggtggggaacaggcatcagttttttaaaaagcgtcacagagaattccaatatgcagttaaaattaagaaccactggattatatagcttgtacatttaaactggctttttggggggattattcaaagatgttttaaataattttttttagacagcatgcctatctaattttctaattaattaaattagaaacttgttaagtatgtacaatagaccaaatcaataaatgcttttgaagcaactactgtaagtaattgaccaaatgccttagtggccaatttcatcacaaagatcattctaaaaatttagctatttttggtttcttggttttttgctaactttctgctaatagttaaataaacatttagtggtgaatgtgtatgttggaactctgcttataaatggttgatgcagtttctcggttaatatagataaaaggcaattccacagatgaatattgtcttgagaattgttaaagtaactcataggaaattcagggatatctggtgcttcagaagattctgtagagaaataaacagtgatgcatcaaacatcttagtccatttggggatgctataataaagaaccttagactgggtaatttataaagaacagaaatttattgcttaaagtactggagactgagaagtccaaaatcaaggcattgattctgtgtctggcaagggcttgctctctgctttaaagatggtaccttcttgcttcattctcatgtagcaaaaggcgcaaaggtagagccctcatgacctgatacccacaaaaggctccaacttttaatactatcacattgaatattaggttctgacatatgaatttggggaagacaccaacatttatagtgtaacactgaacattcatcatagtgtaagatttgttagcccataggaatgggagctacaaaattacaaagggtttaggggtgtcttactgtgggggacaaacaatagcacgaaaactttcatctagatatttcctaaaaggtaccaagaaaagacaggtcctcaggatggaccttgcagtgagttaaagaaattctgtgcttctagtcgccatacaaacttgttacattcttcagaagaaagggagagtcttcaatattaagtttttactgtttaaaataactctttactatttaaaaatgattttgttaagcttatgattaattcatagcccctgtaagtcactacttttattctggatgtgtttaacatattagggcttcattttattttgatttaaagactgacatcttctctttactctactcaattattatactttgaagaaactgacacattacacgaagttctccataaagaagtcaaggtcggtttgttctacaatttttttagagtagatgatgttctataataaaatttcctctgagatcttaaggtgaaagtgttgagctatattaagattacatgacttcaaaaagacacagagtaagcatttgaaagatctcaaaactgaagataatgtaccatatgttagaaggaatttatctcaattcaaatatgcttttaaaaatatagaaattaatttctttgaagaatttgttttagcaaaagatgcttttggaagatcagtttcacccaaagaatatatgaataagctgattttagcctatttcacttgtgacctgttattcatataatcaaatacataggcctaaggatgacttactgggccctgagattttgaaaatgaatgtgttgaaaaataaaaaaaaattctaggacagtggttctcaaagtgtggttgctgggccagcagcattgggattacctgggaacttattacaaatgcaaattcttgatcctcaaccaagacctcctcagtcatatctctggtattgtgcctagcaatctcttttaatgaggctctaggtgatcctgacgcatcctaaaattttagatttctagggattgaactgtgaggttagtgagataaggaggaaattatttggtaaagctagatgatgtggaatcttgactagttttactgtgtctctttaagaattcatttgtagaatgcattttaaagactgtatgtgcccatggatggttataattgcttattgttattgaacaatgggataatttttatgagcaaatttacatgtaacttatgtgcatctgcttcatcttgcttaatttctttcttatttctctcaatgaataaatgcagtttacattttaacaataaatatctagccaacagctgatcctttgaatatctcttttgcttctatttaagttatatggatatttataagtttttttaatataaagttttattgaatagctcatttcttagataaaccctcactacactgagcagtagttttctgtgatttttttttttacttctaatatgagattttcctagatacataataaatttacataaacatacatgtatattttatgtaaatatactttaaaaatatacagtgtctagcacataggaagcatatcacccaacaaaacagacaaagctcttgcccctatggccttactttctagcaaatatcacataatataaatcaaatttaaaagtgaaagtcataagaaatacttaaactgatgacctttattttattgtgatagaccctcgtagtacagtttccatgtgtcatctggaattatttatctattagttataaaggtgacattgtcaataatctatctttgaggatctatctgaatctcttatctgagttcctacctgtagtctttggccccatgtatccagtaactgtcctctgcttctttgatcagtatttttaactataagttcagcaatggtagactcaaaaggattcaaataatttacaatagaaatgccatctgagtgcagccatttttgtctagggcttttctgtgatttatgtgtcaggaccagggagaagaaatgattaataaatatgtagatgcttagggagatgaagagaagatctacagcacttaataacttaatcttctcaaggatgggctctttgtccatatagaaattgtgatttttgtggcctttaaaattcctgctttcacattatgaaagtgataacgtgattttgttttcaaagaatactcactgcctatcctggagtttcatgtgattgttcatctgcatatggtggatctagtgagcacctgtggtctttttgagtccccaaggccccatcccacctgtgtcttttcaagcacccccttgaatatttcaaaggaaatccaccattaattgcaggatatggagaaattcttccattattactgtatttgaaattattgttttactcaattccaaatactttggttacattctccctcccccataatcctagcattatgaatatttcttatgcacactacttttgatcagtgtattcatggtatataattgtcttcagggaagttgaacagagacccttgtgggtgaagactgtacagagatacccatatgggtgaggactgtacagtctttttgtacagagactgtacagagatgatctatacaatagtgagtatggggtgaagagcccttttgacaaaggtagcacctgagccagcctggatggaggatagtggctgggaaaaaatttccttaactggaatgttccaaagtaaagggaattgttttccagcaatatagtccataagaaagggaaaactggattaacttgtccagcttgagccctttgagagccttaagtccttgggacaagcaggaagctagtcctaaacagtgcctcaaaccaggtaggcaggagagtctccttccacaggtttttacttagataacccaacaaagtgaactataagaaccacaggagttaagtactcaattcattttccagctggatgtgtacctgggggaaagaggctctcaatgacccagtgcaagtggcaagtctatatttttgtattttacttaaactcttctatattatcatttgggtgtggatttgtataagtatcaccttactaatgaggattttgaaatttcactgatggaaattccttttggtagcagagttcctaaaccagtagatttggctttttcccatgtcagctggattccaaggtagggagctactcttgggcagacccatttcccactcctgttcccgggtccttgtgtagccttggataagaagctggctaaggatgggtgaggacaacatagagttaataattcatggacacctagtgtctgcattcgggaatagatgggagaatggatgcctttcttcagctccctcagttccttgggatgacaggtggttggctgttaggccctttgctggcaacttctttctaatcatatgtactttctactccatcctcctgctgacattttcacctgcctgcagaaaccacaattaaggattttataatattttgtagttataagaggatgagattctttacaacttgcctattgtttaatttttcagaaatccaacctttgaccaccttctttgtaacatacatataaacctataggatggcctatataatagtatgtatatgtttaacatcacacaagatagcttcaagggggactgagattcattttatattgatacaatctgtaagagaactattttacaattacttgcttaataggaaaaaatctgtaaataaggaaataattttaattttggttctgaaatgtaaacaaagtttctgtgagttgtatgcagttgtaacaggattctgagtattgcagagttgtaggatacctttagagctagaagtaaactcagagatcacctaagccaatcatctcatttttcgtaatataaattttggctgtgattaatatctttctaaataccggtaagaaaacaaacccaaaatgaacatatggctcataagttcaatcgtataatttctctgaaatattcacctgttagagtaaattgaacactgagtagtatttagtatttatcatatattctataatgttagctattttaaagtatgtcctttaatccttcctgaacaaagtgttgttttttctttgtttttttttgtttttttttttttaaaagataggatctttctctctacattcatgctggagtgcagtggcctggtcataactctctgtgtccttgaactcctgggctcaagtgttcctcccacctccatctcctgagcagctgggactacaggggtgcaacaccttgcctggctatatttattattatttacatttttttggtagagacagagtctcacaatgttgcccatgctggtcttgaattcttggcctcaagcaatcctcctgccttggtctccaaaaatgctgggattacaggtgtgagccattgcacccagcccaaaccaaattatttatttatttattattttttttttgagacggagtctctctctgtcgcccaggctggagtgcagtggcgcgatctcggctcactgcaagctctgcctcccgggttcacgccattctcctgcctcagcctcccaagtagctgggactacaggcgcccgccactacgcccggctaattttttatatttttagtagagatggggtttcaccgtgttagccaggatggtctcgatctgctgacctcgtgatccacccacctcggcctcccaaagtgctgggatcctggcccaaaccaaattttattatctcagttttacagtctaatctctgagctgtactcatttagatatgtttggaaacaacttactctggtttacaaggtacacaactagaaatataggcaatccctacatgtaaaaagtcataatccaaaactatttgaattcagaaagcaattccttatgggaacaatgttagaagtgtcggttaaattcccagtttagcctccaaaattccaaatttttccacttgtatctagttgcagttctgcgcatttacggcagatttagaaagcaacctgttgccatccaaatacttagtgagagattatttgttttaaattttggtgcctgagtaaatttggggatgatgaggcagtagagggtaatgtctgctgaaacttctgttgttagaatttctttgtgtcttttatctcatagcttttcttttctttgatgcaaatgtgtaattggtatacttttcttatgcttatttgctataattaggctggtgtgtttatttttctcaaattgaacagagaatgtaggaagagaaagataaatttatatgagataaaagggcaagaattagaaaagagttaggaaaggaaatgtaaaaaggttgctgcctgagataatttgaaggggagaagtgtttagaggagagtggattatttgtctttgaagaagagtcaaggaagtggtgaggggagagacatggtctttaacacatttgtaaactaaccaccaggtggtgccatcatctaaggacagcttagttgcttttcaggatgtgctgaaagcttgctgtgggtgcaaaagttacacagagtggaaagagtgaggcagggaccttacagcttcctgttcatatgtaagttgtgaaaaccctataagaagaagcctagtcagtgtttattaaattagtgagtgatgacttatcagcaagtattaatattttaccaaattcaattaaaaatgtttttaaaatttctttaaatttttgttcttctctttaaaagaggcttcactgttttagttatcaatatataagtaaaattaaaaatttgtagtctctgtaattgttttcatagaattgttatttttatgtgactttctgcacagcttttaaaaagtggcttcatatctagagaatcctttcgtgaaagtttgggacaccatgcaaaaagaacagaaaagaaaactggggaaagattagtgatcacaaggtgaagggaacacaaattttgagactcaatcagactcaatcaaattttgagaaacaccagtttttttagggacgaaatagatatagttaaaaatgtgattgttggtggtaacatttgcacttaaaactactgagacttgggaaaaacgtgagatgtttacaaactaatatgaggcaaatggggattttcccaaagtgaaacagaagactggatagatcttgactatccattctatcctattttaaatggaaaaataaaagtacttgtttggtaatctctaaaagtttttattagaatatttagaatgtatatgcctatttttactgtaattggtgtgagaccatatgaaaataagatatagagataaaataatttatttttgttagtaattttgtgatgtggagtttaaatttggggaatgttaattttctagcattaatctaacactgaatctgtttttcaagtcaataggtaaatagcaattatacttagaaaatgataacaaagaactttcaacaaaggaaataaaaagctttgttagcatgaagaactaagtttgtagttacttgcccagacaaaggatgaaccctcatttaggtttctattgattgcagagtagcccatcaataaaagaagcttttctaaggaagataatatgacagcaggaaaaacataattttgcgcctctaacctcaaactccatccacattagtggcagttctttaaaaaaaaaaagcaaccccaggtattcccattgctttgcaactagtgtatttcttaagagtattatgaggaagaaaaatgcctctgggaaatgagaaagctacgtggtgtccaaacttgaactttctgctagatctcatgcccatatttgcctttgcctactgggtgtcttcacttggaatttgcacatgcatctttgaattgttatgtctgagacatttcttatcaccaaggagttttccagcggatattctgattataatgatttattttttagtttcttgtttggattgtgctctgtacacttcctccttcttctttaaactatcgcctaccccatccccacctccccccagcccaccttgggttgccatgtctgggtttacatgatcctgtgctatgctctatttctgccattacagctcttatcacaccatttgcttgttaatatcgcccactggaatgtaagctgtgtgatagggggccaaatttactttatcaattgctgcatcattagcaactacccatgcctggtatatgttaaatcaataatatttgttgaataaaacagaccaaaaacttcatatttttggcaaagaattggcataaacagcacaggagatacaaaaggcggatgggattaatcttgctgcaccaccagcccctcactgccaatagaggagaatgagggtgggttgggtggaggcagatgaagagtgagaggtgggaggtgatggtggtagtggagacagatgacacagaaaatcagcttcttcctggtgagtaatggagctttccccgacaacctccccccacccctttctcttcctattctctctagttctaattatcaccagctggagccacttaatcctaacagtttacatgttactaaagcatctgtgagaatgcagtgcaggcttcagctagcaccaaaacaatttttttttctgatttcgcttgctatacctttacctcttagaatttattaatctgagggatgggaaaaacgacacaaattacattatttattagagatacgagtctgtctccttgtggcacatccccgaaactggtctcatctgggctcatcctgaattgcatttaatgcagcatcactatttaatttatggatttaagttccaaaaagttaaggacaaaaataaatgtgcatcaaggacaaaaacaaatgtgcaacaacaaaaaaatatgcatcaagatgcctgtctatccattctcctgaaagaaaccaaaagcgggcttatgaggaccaaattcatgtgaaaaagccatttcgtgaattagggagatagtgttcaacttgtagattttgacatttggatatttaagactttggaagacattggaaattagttgatttgcccatcatctttgaacacatagaactacttttgtgcctactcagcccttcctctccctggagtgcctcctcgacatgctttgcctgggtatcttctgtgtgaactgtgagacttatctcagcaatcacttgagcagtctatccctgctgtctgcagacatttctttagcactgtgaccactgctgttcccccaacactcccatgctctgttttcatggcaacatatgtctcttcaaccagttctcctcagaaactctggaatctttcagaaaacagtctgagaaattctctctacttgatgagtcaggcagtgctgacccttctcacagaatttatcatcaatgcccaaagagagtagagcttgactcgcttccttctgttctatgcattctagttcccttttaaatgttgcactagccccagcctcagccgcagccctctttagtattaagatggtgtctattggccaggtgcagtggctcatgcctgtaatcccagggctttgagaggcccaaggggggacttgaggccaggagtttgagaccagcctagccaacatggcaaaaccacatctctaccaaaaatacaacaaaattagctgggcgtactggcacacgacaatagtctcagctgctcaggaggctgaggcatgagaatcatttgaacccaggaggcggaggttgcagtgagctgagatcccaccactgcactccggcctgggtgacaaagctagattccatctccaaaaaaaaaaaaaaaaaaaaaaagatggtgtctgttgagcacagtgtgtctcagtgagtgggctcatggactttccttctgagagaaaactcaacaagcttttatgacctgaatgtttgtgtcccaacaaattcatatgttgaagtcctaccccgcagtgtgatggtatttggaggtagggcctttaggaggtgattgggtttaggtgagggtaagccctcaagatgggattaatgttcttataagaagaggaacagaccagaacacatagaactactttgcaaagtagttctttgccaggtgaggacatggagagaggtggtcatctgaaagccaggaagagggccctcaccaggagccaaactggttggtaccttgatcttagactttatagccttcaaatctgtgaaaaataaatatctatcgtttaagccacccagtctatgacatattgttatagcggcctgcgctaagacacaagccaaagctcacttttatacagcattggagcactgcctccagggccggctagcccaggttggaatgccagttcctctctgtacaactgtaagacttaggggaagtttcctaacttgtatgtgtctcagtttcccatctgtaaaatgggattgataattatatctatctatagttgttatgaggaataaatgagttaatccatataaagcactcaaaacagtacagggcacagtaagggctcaacacatgttaacctcattatatatgttaacgtacagctgaacttggcgcaccgctgattctgatgaatgtgatcatcatcactcgctcctggccttctgcggttcttgcaactctgttgacattcctgcatcctgggatatacaacacatactcaaccataaaccctacgagcctgttgtcttgtggaggaagcagccgagcagcacagctctgggatagatctctcttcctcccacatctctctgaacacttctttccttcgtatcctcccacaggcccacaatttaaaaattcttatttctcccagaatactagaaaagtggttgaaagcacatgggtcccagctactgttctaaaattcacatctaattatgccacttaccgtttgaaaacacctttgatactttctcatctcccatgggataaaatatgaactttctagaatgactttcatgtatctttccttattttgtagtcctgccatctcatggcattccttcccattgcccttcattctcatacttgcacacctcttaactttgttacctccatgtcttctgcaccctctcccctctactaagttcttttctttgcctggtaatctcttactgtccttgaagattcagctcaaagttccccttttggctgagtgtagtggctcacgcctgtaatctcaacactttgggaagccgaggtgggtggatcacttgaggtcaggagttcgagaccagcctggtcaacacggtgaaaccccatctctactaaaatacaaaaattagctgggcatggtagtgggcgcttgtaatcccagctatgctacttgggaggctgaggcaggagaatcacttgaacccgggaggtagaggttgcagtgagctgaaattgtgccactgcactccagcctgggtgacagggcgagactccatctcaaaaaaaaaaaaaaaaaaaaaaagtccactttcatgctttctttgacattcttagctgttcacttgtctaatacaatttttacacctacttcttcctggttagggatctccagtaagagagaactccatttaaaagttgtctgcagtgtcctctgtatgggaggagatagcatgggaggagatagatatgctctctcctttggagtacagagtcatgtattcagctgtccccttgacacctccacttggctgacccaaaggcaattcacagttgatgtgttcctcacagatttccaaccaagacctgatcttccttagtctctcctatttcagtgaatgatcctactatccatctagttatataaattagaaactccagagtcagtcttaatacatcctcttattattattatatgtaattataaataattatagattatttttgttctgtgaaaaattattcaagaagctctttttaattatattttgggggctgaacttgtttgtagctgctgcgaggaatggttttgaatcttttcctagagagaagtatgtatacctttctttctctcctatacattaccgtgtggctatattattaaattaactatattttgctcaattagtaagtggattttaggggtgagtgaaatgatttctctctgtgttaaattggtaaaattccatgtgaaaagcactgttgtatgaaggctttttcctaagtacaaacctataatattagcttgttattgtgttgtacagttccctcctataattgtgggtgtgaagtttgcattttactgtttgtgttttatttactctactgtggagatgttcttggccacacatttctaaatcccttaggtttcccactttatggctttttgacaaccaatttggggtttgtaagatatgatatataatttataatgaagtcgaacatgtgttcatctctatttttatttcaattatagttatcaagaatcacaaaaatgtacattgataaagtactataccatcagcaaagatttttataacaagatgtggaacttcaaacaggagttatatgacacagtataataaatggtggcatcgtttttttgaaatgtgaaagccagatcttttatatgctgtattttctagactactactgggtcctcccaaaaaaagaagggctggggaggtgaaaagtaaacattttaagttctgaaaattattatagtaaaaatggaaactacttagataagatatctaagataaaaaggcaaaaggataaatttattttagggggaggctctaattcccatttcaccatttggcttaatgtcatgggtgacaacgtctaccctattgtgaggctagatgcaaaagaatgttttctttgacaaaaatgttcaaaattaagttattggagttgggggagtctcattgaaaaagcatttgtgaattttatcacggaaggatatttggtcatcttctcattcagcttttggaaagatctggtaaggaggaaggacctgaacggatccacatcctgaagaatttgccatacacagaaggaagaaaggaaaacatattgagtagggagataaaggaagggtataatatatagacaaagtgtagaggtaaatactcatcattcaggcttggaggatggcaagtagaccagtttgattggcctagagatgtttggaatttgactgtttacctgtaagagtggtgggagaagttgagaccagattgtgaagtaaccagaatagtaccaatatcaaatgtttatatcttactctgtagaaaggagggaggcattgttcttggagggaagagatggtgtcttaggactttttccctctgctgtttttaacacagtacctggtacactgaaggcattcagtaatacccgaatagaatgaatgagtaaagaggagtagcttccatgactcataagtttctatctccaacgtagatctctcctttggagtacagagtcatgtattcagctgtccccttgacaccttcacttggctgacccaaaggcaattcacagttgatgtgttcctcacagatttccaaccaagacctgatcttcttcagtctctcctatttcagtgaatgatcctactatccatctagttatataaattagaaactccagagtcagtcttaatacatccttttacccaccatctccaatatgccaccaagtggtactgatgtcaccttctaaatatgtctcaaatcaacccatttctcccgatcttcactggtcagtgctgcaaacaatccaccccaggatcactgcactcacttctaactggtctctttgcaagcactttgattttccttcagaataatctctatgcagcaaccaaagagattttttttctattggcaaatatgattatgttcctccaaacttaagagcgtaagtaacttcctattcctcatagggtgagaccaaatctttgacacggcctgctggtcctttactctgtaaccccacttccttcccaggcttgtttagctttccctttaactgctgctctttcttttggtttccactgggtccccatttcttcaccctcctgactagattagttcctcctttgtatggagcaccatgtgccttggttttgtagcacctattatagctgaaactgttcattaattgttttgtttggttattaacattcgttttttccacagattgagttctatgaaggtaggatctgttcagcattaaatttccagtagttagcacagcaactggtgggcattcagtgaattgaattactaattacataattatgtatctatataaatttatatatacacacataatctagtggcggcatggaaactgaacaggtatgtgaagaattggagactattagaacattcccaccatcagccaggcacagtggttcgtgcctgtaattccggtgctttgggaggctgaggcaggagtatcacttgactccaggatttggagaccagcctgggcaagctatcaagaccccgtcagtacaaaaaatataaaataagctgggcgtagtggcacacgcctggagtcccagctactcgggaggctgaagtgggaggatcacttgagcccaggaggtcgaggctgcagtgagctatgattgtgccactgcactccagccacagtgtcagagtgagactctgtctcttaaaaaaaaaaaagaaaaaatattcctacacagtgtgacaagagtttgagctgcatctgtggcaatggcaagtgaaatcttggatgtgggagctattgtgaagaaagtggtgaatagagaggcaagaaaaacacagtgagctcaattttctgtaaacagtggtaatttctggacatctgcaagagaattagtgtgatatagatgatggccactcttctttctctctccttctctctctgttttgcatgcatgcactcacacaaacacaacacaaacacactcagagaagcctccaatttgtgtgtgttcaggtgggactgagaagactgacgtggaagcaggcacttctacactgtatttatattaagactgccctttgatttgcagctgtggcatctatttgcagagtttggctaatttttcattttagattcatgttcttcctgttgttttagctcagaaataaacagtatgctcagagctatcaatgaggaaaagggctgaaaaatctcatttttagctctattaagctagtctgtgatttgtcagagcatagtcagagtccatccttatggatttactactgccggatatcaagttcgcaaaatgcaaagtacccttggattgctgtgtgttacagaggctacgatctaattcttatgaagaacacaagggatatgctaaacagatttttttctaacttttaaaaataataaaaccaaaacattataccaatcttctgtgttttttattttgcatattttcttctagtctttgtgcatttacatatatgtctcacagttatctttcccattttatttactatttttcacctcacatacaaagtattttctcatgtttctgtacattcttcctaaatatcctttttcatgaatccgtatttcaacagatttatttatcttgatttattttatcattcttctacactgactgttttagatttattccccaatttttactgttagatgatggtgtagtacatacagctttttcctttgctaatttatttacccaagctaaatttcccaatgtgggaattcaaagttaaatagtatagacctcttgaactcttttttaaacttattataatacagttttaaattgacacataataattgtacaagtttatggggtatataaaatgtataatgttttggtacatataatgtataatgatcacatcagggtaattagcatattcatcgtctcaaacacttatcattcctttgtgttgggaacattcaataccctccttctagctattggaaactatataatacattgttgttaactatagttcatcctacagtggtatagagcactagaacctattcctcctatctagctttgaactcttgatacatattgttaaattgctttcccaagcaatttagcaaactattatgtttatataatgtcaaaccattatgacaattcataccaaaagtgtatgaaagcagacaaatatatttgcacaatgtcatgtacaatgtccttttttaggtcatgtacagtaaatggcatctttgagagataaagatatgacattgtaaagttaaacttgggattatgctgtggttggaaaaatatagaaacacaaacaggagaaaactctttgaaggatgtaaaattgcagattaagaaattcaggaagctcaggagatacttaaagatattaaagagatactaaaaatggaaaactggttgaggttgaatgagagagctgcaagagaagaaagaaatcttttaggatgagctttgtattcattttctggggccactgtaacaaagtactataagcctgtgtggattaagcaacagaaatgtattgtctcacagttctggaggctagatattagaaaccaaggtattggcagggttggctccttctgagggctgtgagggagaatctgttccaagctgctgtcctagtttttggtagcttccagcattccttggcttgtaggtgatgttctctctgtgacttccttcaattgccttccctctatgcatctcggtctctgtgtccaaattcccccctttaataaaggacacagtcgtattggattagggcccactgtaatggccttatttcaacttggtcatctgcaaagaccctatttccaaataaggccacattcttagatactgagggatacgtgaatcccattatccttctgggagaccgagttcaattagtaacaaacctcaaatgcaaatttatgagcagacaagatggattaagcgcaggacagtggggagagattgtgctttaaagtcaggcagtgctagggttgagtcccaattgagctatttattgcttctgtgatcttgagtatgctatttattgtctctgagcctctagttgcctcatcttaaaatggactaattttacctattttgcagtgttatgaggattggagctaatgaaagcaaaatatcttagtacagtgtctgacctcatgagtgtttgataagaggtggcttaaaaaatgtcactcttggccggccacggtggctcatgctggctggcatcccagcactttgggaggccaaggcaggcagatcacgaggtcaggagatcaagaccatcctggctaacatggtgaaaccctgtctctactaaaaatacaaaaatattagccgggtgtggtggcacacacctgtactcccagctacttgggaggctgaggcaggagaatggcgtgaacccaggaggcagagcttgcagtgagctgagatggtgccactgcaccctcgcctgggcaacagagcgagactctgtctcaaaaagaaaaaaaaaatgtcactcttaaggaaaaaaaaaatctatcgtcagaggtggtgggattccttgccagaggatcctttctgaatgtagatctcaacagcacaggtaatctttgtttagggaagatttctcctaatgaccctttaggatcccaagtggtagacaaagtacaactgacctaaatacatacagactggatctgcagcaatcaccaaagtttttttctttctcttattctcattttctctgacagcctcctttttcagtcatagaactccttcagagttcatgactaaaaatgacgtggagtgtcaaggtggtaaggcaaggtggagtttaggatttagtgatatcttgttttagatgctaattttattggtgtggatttgacattagtaagcatccctaatagtcttcaaaaagtgttttttaaaaatagagacacacaacaggtcaagtgtttggcaccattttctgcattgacttgaggttaaggaaaaattcagcctgggaggcagcagattgctttctagtttgactgatggcctttctacagtaggatggatcacactccaagtaggagacagtgaggaggaaactcaggatttgctcagaatcctgaataatcttttgctaaagggatttgaatatgacaaaatctgaggaagagacattatttgtatgtacactttttggtcttctggttttaatctgcaggcacaaagaatgatcaatatagtctcaggtaataatgggagaggatataatgtttatttggcaggtgaagaagggacaactttggtgtgttttagatgaagatattagagtaatgtgtgaacttccattggcatacccagataggaacaggtctttttgttcaggaacaaagtggagctacttatctgctctgtgaaacagcttcaaagtcacccatttgtcatttgaatccacctggtttagacatttatcttttacaaatgatttaacttgggaaatttttttttaaagatactagagatcattgagaatggctgaaacaatgttatgaaacaaactgtgtaaggtttactaaagttataataaacaacaaactactcctaagattctaaatgtttgtttctaggctggtctcattgggagattagtgaaagctttcgaatggtttaaataaagaaatacctttccctggtccagggtgcatttccttttgtatagttgtagttgcagctgtgcattgtctagttgtaattgtagctgtagtctatgctgattcacactctgtgtatcttctgtactagttttgtcgtggacttgaatcagagtctaaatattcctggcatagaattctcagcctcggctgggtgcagtggctcacacctgtaatcccagtactttgggaggctgaggcgggtggatcacgaggtcaggagatcgagaccatactggctaacacagtgaaaccctgtctctactaaaaatacaaaaaaaaaaattagccgggcgtggtggcgggcacctgtagttccagctactcgggaggctgaggcaggagaatggtgtgaacctgggaggtggagcttgcagtgagccgagatcacaccattgcactccagcctgggcgacagagcaagactccgtctcaaaaaaaaaaaaaaaaaaaaagaattctcagcctcaccagttgctccgagttagaacttcaggaataaaattttggaatgtggaatgaaactcttggaacttgtgctattttccatgtatttttttccagagggatggagaggtcatctctggtttgatagagacaatattcagtcagagcttggataagacatgccattttctgaagttagcaccatgggagacactggaaattttttactttatgttgactattctaagatatctctgagttttatcactatcgtggtgttccagggacctgaagatccactaagggttttagttgtgctcaggaggcttgagcttggcctcctggtgattgaccaatggctaagtcctcatctgaattatgggcccacaagaaggcctaacaatctcagcaataccagtaggtcatctacacttaatgctctagtggtccaaacactgtattaagcacttaggtaccctgggctcttataccaagagatgtaggcaaggaagcagaccctgtttttttctctcccaccctgggtttcaggggaagatacccttaaagtcttcattcttttgtaggaagtatgcagctggcatcagaagctggaagataggatcttcccggatcacagctcctgttcagaaagtctgaggatgtcagactgagactgttgagtctgaggatgtcagactgagattgttgagtctcaggatgttgcaggacaggatggatgaagaatgctagtcctggcagttggggcctaaggccagggcccttttttatcactttcttgtgttgcctctctgcccaagaaaaaatctgtctcttgcatacagctcctctaatacgtgtccattagaaggaaggagtttctttaatgagctctatggttttatcttgctcataacagcttagtttaatgccactgaaactgtaacatttttttgtgcctaatatcaactgacaaatataaagttattcctaatttattaattcaaatgatatattgcaaaataaaatctgcttaatatgaaaagaagtaatcactatgactgttgctttttcctttacaaaagtcaggataattgttaacaatgttctttagaaagttcccccatatatttctttaatgaatgatccatctttaatgaatgatccatcatttcccaacagatttgaaataccacttttttatatatgctcccacatatgcctggtttgtttctgggccccatttatttcactgacttatttttccatttctgtaccagaacaaatttttttttttggtgttttgtttgtttgtttgtttgtttatttatttatttagagacagagtctcaccctgttgcccaggctggagtgcagtggtgtgatctcggcttactgcaacctccgcctcccgggttcaaatgattctcctgcttcagcctcccgagtagctgggattacaggtgcccgccaccatgcccagctaatttttgtatttttagtagaaacggggtttcaccatgttggccaggctggtctcaaactcctgacactgtgatccgcccacctcggcttcccaaagggtcaggattacaggcatgagccatcgcacccagccacaaatttttttaatgtacactgtaaggcatattttgaatgtgtaggactagactcgattatttacttttaaatgatttttgacaattctgcatttattcttttgaaatgtctctttaatttaaaacaaatctgttaatatcaatgagattttgcttggacttgaactgctagattaactagcagggaggtgttgatatccttacgatattaaatattcctatcattaacatgatatatttctccactttagatatctactttcctcttcttcagcaaaatgttattactttctttatgcaaagatcactttgtgcatttttccaaatatttccttgcttactcacattttgttagaaaactataaaatttttattgtatctttgttttataaattgaattttcaaaagttatatgatcctcttgttattgccggaatagaaaaggtattggttttgatatatttaccttatattcaaaattctaataaactatcttagtacctccaatttattttagttgattttcttgcaatttcagattaccttggttagacattcatatcatctttaaatagcttagtctctgtctgatatttataccccgattttctttttcctgataaatcttatagtctaggaccaacagggtaatagttgtggagggtgggtatccttgtcttatttccagatgaaatgagattgtcttatttccagatgaaaagagaacatctgcattgtatgttccgttgtcttctgttaaatgctgtcttgtgttggagaagtttaaattatagaggacttacttattcttcaaaattttgatagaacttttatataaaaatatctgggcctggtgtcttttgggggaataaacttttgactacattttccatttttctgtggttattggtttgaactttcaaatgttcagttactttttgcattttggtaatttaaattttcatgtataataatcctttcttatagcttcaacatcattgattagggagttttaacatagtattattttgtaataaaaaactctatcttataattgcttctcttcatctttttattatttatgtctttgctctttcttggttagacttgttaaatatatttctttttttaaaaacagggtcccaagtagctgggattataggtgcgtgccaccatgcctgggctacatatttctgttttagtagtctttcgaaaaaagtagctctgtattttaaagtctggcatttttgtgtgctattttttattccacgcattttgtttattaagaaagttaccgtcccaccaacagtgtaaaagtgttcctatttctccacatcctctccagcacctgttgtttcctgactttttaatgattgccattctaactggtgtgaaatggtatctcattgtggttttgatttgcatttctctgatggccagtgatgctgaacattttttcatgtgttttttgtctgcataaatgtcttcttttcagaagtgtctgttcatgtcctttgcccactttttgatggggttgtttgtttttttcttgtaaatttgtttgagttcattgtagattctggatattagccctttgtcagatgagtaggtcacgaaaattttctcccattttgtaggttgcctgttcactctgatggtagtttcttttgtcgtaaactagttcaaccactgtggaagtcagtgtggctattcctcagggatctagaactagaaataccatttgacccagccatcccattactgggtatatacccaaaggactataaatcatgctgctataaagacacatgcgcacgtatgtttattgcggcattattcacaatagcaaagacttggaaccaacccaaatgtccaataatgatagactggattaagaaaatgtggcacatatacaccatggaatactatgcagccataaaaaatgatgagttcatgtcctttgtagggacatggatgaaattggaaatcatcattctcagtaaactatcgcaagaacaaaaaaccaaacactgcatattctcactcataggtggaaattgaacaatgagaacacatggacacaggaagaggaacatcacactctgggacagttgtgaggtggggagagggggaagggatagcattgggagatatacctaatgctagatgatgagttagtgggtgcagcgcaccagcatggcacatgtatacatatgaaactaacctgcacattgtgcacatgtaccctaaaacttaaagtataataataataaataaataaataaataaataaataaataaagttacctttggatttattttcttgttctctttctggttcattagttgaatgttcccttcccttaccttcccctcccctcccctcccctcccttcccctcctttcccctcacctcccctcctctcccctcccctcctctcccctcccgtcctctcccctcccctcccctcccctcctctccccttcttttcccttcccttccttcctttctctctctttctttctctctctttctccctttctctctctttcttccttcattccttcttccttccttcctctctcttttctttctttctcttttctccttctttccttccttccttcatttctgtgtctctctctttctctccttctttctttctctctctctctctcccttccttcttttcttttcttttttttctttttcttgctctgttgcccaggctgcagtgggattaaagtgattctcctgtctcagcctcccaagtagctgggactacaggcgtgcaccaccatgctaggctaatttttgtatttttagtagagatggggtttcaccatgttgggcaggctggtcttgaactcctgacctcaggtgatccacccactttggcctcccaaagtgctgtgattactggcatgagccaccatgcctggccgattttcagttcttttctaataaatgtagagtttttattttcttccaagtgccacattgggtgcacaccataaattttactatatgttctcatagttatttatttataagtaaaacaatgttagtagcttttaaaacactacttctgtgaatttatattactggattatgataatatctaatgtggcttataaatttcaaatctggggaattttttgcgagttttattatgacttaacatgtgcccagttcttctgcagtatttcagagttgtttgaaaggaaagacagtctttctatatttggtattcattctatatatgttaataaaataaatttggtaatagtattattcaaatcttctataaattcttttatttttttgtctacttaaacttttttttcagattgagagagatgagttaaggttttctgttataaatttgactttgataaatccacattttttctaatagcttttactttatattttgataatatgatatcaggcatgagctttcatgactatagttatcttcttgaggaaattacagttcatatcattataaattcttccttgtctgatttcatgctttttgacttgaattctactttttataatgacaataatggcacacgtcctttcttttattgtgatttctctggcatatatttatctatgctttatttttcatctttctcagttgtttatggtaattaccatgttgctagacattaaactgaaactttattttgcttttattaatatattttatcttattctcatcatctatttctgttctttatttaacatttttaatgaagatatcaaaacattttcctatgtgaaaaaagtaatcgttaactgtatcctaaccccacagcattccaatttttcaaccctcataccagtatttgttgtaatcataggggttttgtttctaaaatgttatgtattaatagttacatttataatgactttgttttttagaaaaaactttctttttttagtttaatatttacagaaaatttgaaaatagtacatatagttatcatgcacctcacacccagcttcccctattattaacatcttacagtggtatgatacatttattacaactaaggaaccaaattgatatagtattattgaataaagttcacacttgattcagattttctcagttttttaaaaatcttaagtaactttactagaaagtttgtctaattttaggcatagaaataaaaggctagcacatttgatgagtaaacgaagattatattattttcaaataccagacataaatattttaaatggaaagattttaggcctaaaatatgacattgaattcatgacctcaggaatccagcaggttgtaatttccagacactgtaagtacaatagaaaccatcaactaaagtgtaaccaaccagtaatatctagccacctgcaaatttcattaagaacttttaaattaacttctagataaaatagaaagttcaaactgaaattacttttaaaggcatggaaaagtgctaatgaagaagcatggtcactgaagccaaaaacctgagttcaaatgaataattctaccaatattagcttaatactgtagaaaaacagtaattttgaacacatgtaggtattattctcagcagtggagtattatgaattcagaaatgtgtgcaaaaacataaacttggttttcttttcattttaacttttattttagattcagggctacatgggtaggtttttaaaataaataaataaataaataaataaataatatatatatattttttagatggagtctctctctgttacccaggctggaatgcagtggcacaatcttggctcactgcaatacctgcctcctgggttcaaacgattctcctgcctcagcctccccagtagctgggattacaggtgcctgccaccacacctggctaatttttgtatttttagtagagatggggtttcaccatgttggcctggctggtctcaaactcctgacctcaatgatctgcccaccttgacctcccaaagtgctgagattacaggcatgagccacagtgcctggctgattttttatataggtaaactacttgtcatggggggtttctgtgtacagattatttcatcacccaggtaataagcatagtacccaataagtagtttttagaccctcattcttgtcccatcctccaccctcaggtaggctccagtgtctatcattcccttctttgtgtccatgtgcacccaatgtttagctctcacttataagtgagaacatgtggtagttggttttctggctctgcattcgtttgcttaggatgatgatctccagctccatccatgttgctgcaaaggacatgatctcattcattttttttgactatgtagtattctatggtggatatgtcccacattttatttatccagcctactgttgatgggcatctagggttgattccatgtctttgctgttgtgaatagggctgtgataaacaaacacatacatccctttactgagtatttacccaaaagaatataaacaacttattcaaaagaatataaattgtttatattcttttggttaaatacacagtaatgggattggtgggttgaatggtagttctgttttaagttctttgagaaatctcaaaactgcttcccacagtggctgaactaattttcattcccaccagcagtgtataagcattttcttttttctgcaaccttgccagcatctgttattttttgactttttaatagtagccattcttactggtatgagatgatatctcactgtggttttgatttgcatttctctaatgattagtgatgttgagcattttttcatatgcttgtggactgagcgtatgtcttcttttgagaagtgtctgtcctttgcccactttttaatggggtagtttgttttttgcttgttaatttaaattccttatagattctggatattagacctttgtcagatgcacagcatacatatattttctcccattctgtaggttgtctgtttactctgttgatagtttctcttgctatgcagaagctttttagtttaattaggtctcatttgtcagtttttgtttttgttgtaattgcttttagtgttttcccatgcaatctttgctagggcctatgcccaagatggtatttcctaagttatcttccagggtttttataattttaggttttacattcaagtctttaatccatcttgagttgatttttgtatgtggtctaaggaaggggtccagtttcaatcttctgcatgtggctaatagggaaagactctctattcaatattcaacagggagtctttccctattcaatggtgagtctctccctattgcttatttttgtcaactttgtcaaagatcagatagttgtagatgtgtggcattgcttctgggatctctattctgtttcattggtctatttgtctgtttttgtaccagaaccatgctgttttggttgctgtaaccttgtagtatagtttgaagtcaggtgatgtgatgtctccagctttttttgtttgtttttgttttttggttatgattgcctttgtgccttagctatccagacatttttttttgcttctgtatgaattttaaaatagttttttttctaatcatgtgaagaatgccattggtagtttgataggaatagtattgactctgtaaattgctttgggcagtatggacattttaacactattgattctttctatccatgaacatggaatgtttttccatttgtttgtgtcatctgtgatttctttgagcagtgttttgtgatttctcattatagaggcctttcgcctccctggtttgctgtattcctaggtgttttattccttttgtggctattgtgaatgcaatcgtgttctcgatgtggctctcagcttagacaatgttggtatatagaaatgctactaatttttgtacattgagtttatatcctgaaactttgctgaagttgcttatcaaatctaagaccttttggggagagactatggagttttctaggtatagaatcatatcatctgcaaatattgtttgactttctttctatttggatgtctcttatttctttctcttgcctgattgctctggctaggacttacagtactatgttgaataggagtgggcatctttgtcttgttctggacctcaaggattcagatttccttagtttttatcctatgtactttttctgttccaggagctcatccaggataccacattacatttagttgtcatgtctccttagacttctcttggttacaacaatttcttagacttcccttgtttttaatgagtgtattagttttctgtggctgctgttactaattaccatgaaatttattgcttaaaatgatataaatttgttctctcacagttctggatgctagaagtctgaagtcccacagggccacagtctgtcaggggactttagggggaatcactccttgcctcatccagcttctggcattcctggacttggggctgcatcactctaatctctgcttccatcttcacattgccttctcctatgtgtgtcctttgttaaatctctctctacctctattttataagggcacatggggtttagggcccaccacatttagggcccacccagataatccaagtaatctcatctcaacatcaaaggctttttatttttttttccaaataaggtaatgtttacaagttccgggacctgacatccttgggtgtccgttatccaacttattaccataaccttgacagttttgaggaatactggaaaggtattttatagaatgccttctattacactttcactgttatttttctcataattagactggggttatggatttctagaaggtaaaacacagaagtaaagtgacattttcatcacatcatatcaatggtagatataatctgcattacttatcactgttgatgttgatcttgatcacctggctgaggtgatgtttgctagatttttttattgcaaaattaattttcgtttccgatctttcatactaccttctttgtaaagaggtcagtttgcagaggacacacttaaggagtgggcaattatgctccttttccatgaggtatcatatctacaataaattatttggaatttttccatagaggggaaatgaaacttgtctcatctctctcatttgtttacttattcaatcatttacttatttcagaatagactcacaggtatatattttatactttgggtaataactctgtactgccttatttattttattgtgaaaattattttatctttggccattgggagctttttcacttggctcttgtgtccctttgacacattcctatcagggtagggttttttttgttgttgttattgttgttttttgtgggttttttttttcacttcctaattttctggcattactagatcctccaggctcatcttgtatatttcctaccttagtcatagaattagccatttcttcaagaagccctgtatccttttcctggataagggaattacaaaccaagaactcggtgctaggtgtgcttatgttatgggggtgctgtttctcttaggtcctctcagctgacagagcaagaaaatatatgtgtgtatactaacctggtacatatacttatctataaatgcttccatatgtaaattatctatattaagctaaacgtgaattcatactgataactccagttataatccattaccatttggattattcctgcctgctccacttgtgtatctgtaattttctactccaacagtaagaaacatggctactgacatctaccattatttatttaattgttcaattccaatatatatgtgtagcagtatcagaatggttaactcataccctattgggaaataactttgttaactggagtacagtgcttatatacactttctatgcctttagccttacagacttcactcattactaaagaaccttaggtcagcaccttttccccctgcttctttcagtggggtgttttatacattttaaacaagaattagatacttttgtcacaatcataattcctttatggaaacccccaatctcttaaatgactttttaactcaaatacattaacattcactttttgttctgtaaagttctataggttatggcaaatgcataatgtcatatatctaccatttcattgtcaaacagaacactttcactgccctaaaaatctcctggactaacaattacctattccattttgtcgctacccctaattcctggttaaccactgatctttttactgtctctataattttgcctttttcagattgtaacgtaattgaagtcatacagtatgaagactttttcaaactggcttctttgatatatcgataagcttttgaaatttattaatgtctgttttttgttttctatcatttcctttaattgttcttagaattttcatctctgcttacaataaccatatgtttttgcattttgtctacttttttccactagaactctttatatattaattacagttgtttaagattccttatgtgataatttcaaagtctgtgtcatatctgagtctggttttgatatttgctttgtctctttagattgtatttttacttgctttggagcatgccttgtcattttttgtttaaagctggacatgatgtattgggtaataggagctgagacaaataagccattggtatgagtttttttttgtcattctggctaggagtttaatatttcccataattgtaaatgccagaggctttggtttcctctagtgtctttatttttcccatccatgttggctttgggtttctgaaagaagatcttcttagagaagagtctgtgtcttgcagctcttttcattgtaatctgctgtttattatactggaaccctgttgatgtagtggtaagatgtggagatgggaaagcattttataattttgagatgaagtctcagttttttaatgtgcttgtgtctctgtcctgtgacattcacaaatgtttcttagcttttttcctcttctacttatatgagacaggaaagttagagggagctaaatttggataactgcttttctcccaggctggataagactttgaattgaagaatagtattaaaaaacctcaccaaaattcttttaactttgaaaacatattttccattattagaacagaattcttgggccgggtatggtggctcatgcctatagtcccagcactttggggggctgaggtgggcagatcacttgaggtcaggagttcgagatgagcctgaccaacatggcaaaaccctgtcgctactaaaaatagaaaaattagccaggcatggtggcaggtgcctgtaatcccagctactcaggaagctgaagtaggagaatctcttgaacccgggaggcagaggttgcagtgagcagagatcacaccactgcattccagcctgggtgacagaatgagacttcatctcaaaaaaaaaaaaaaaaaaattcttttagaaactgtgagatgtaaattgattctaagaaagtatgacaatatgaaaattgtaccaggaatcacagtgctctttttaactgattcttccccagcaatacaatgaagcaggtttacaaaataaactgattgattttaaaaatatataaatatggctatttcaaaaaattataagaaacagaaaagtataggcaaaagaataaaagtcatataaatcccatcagcagagattaccactgttaataataattgttttgttgtagttaaagtatgttttattttatctggttgaaataacatattttattcaattttgaaacttcatttttttgcttaaaactttatcataagcatttccttatgtcattaaatatctttataagcattttgttggttgcatattatttcatgttatgcaacctcattcaaaaaatgcagacaagaaggtctaagagagattgtgagactgcttcttagagataaattcacacatcaaatttacatgaacaaatacagccttgcctcaatttgaagtcagataggagtgttgaagtcatcctgtgtgggtatgatatatagaacacacgtcttaatgccacagagtgaaagaggtaaatattagtatgtggaaaggttattcagggaatccatgagcaactttgaggtgtagccactccagagaactttagggcaacctgtgtgactggtgagagtgaagttggcttatccattaagtacttcattaaagagctctttcttgattgatacgtggtataccccatgcatttccttgaggcagtgtggacacaggcagggtctgtggatttggcagtctggcatcaggcagggtctgtggattcaaatgcatggtgcttaactttgattatttctttccatatgaaataataggaaagccctattttcctctcaatccattcatttaaccccaaatcctcagcctctccaaggcaccacacacacccagagccaacaatatgctaaggactgtgtgaattaaataaaacataagataatgttctcattttgaagaggcttgggggaaaggataagtaaacagacaaattgcaatgaaatgttataagtaatatatagacatagatatgaaaaagtaaaaaaagaagggagtaactctacctgggaagataactttttcctttaatttttagttgacatgtaataactgtacatatttatggatacaaagagatttttcaatatgtgtatgcaatgtttaatgatgtgtaaacaatatataatgatcaaatcagggtaattagcatatctatcacacctcaaatatcacttctttgtgttgtgagcattcaaaagcttctcttcaggagtcaaattatctttgtttgcagatgaaatgatcctatatctagaaaacctcattgtctcagcccaaaagcttcttaagctgataaacaacttcagtcaaatctcaggatacaaaatcaatgtgcaaaaattgctagcattcctatacaccaccaacaggcaaccagagagccaaatcatgaatgaactcccattcgcaattgctacaacaacaaaaaacacctaggatacagctaacgagggaagtaaagaacctcttcaaggagaactacaaaccactgctcaaagaaatcagagaggacacaaacaaatggaaaaacatttcatgctcatgataggaagaatcaatatcataaaaatggccacactgcccaaagtaatttgtagattcaatgctattcccgttaaaatactattgacattcttcacagaattagaaaaaactatctcaaaattcatatggaatcaaaaagggcccaaatagccaagacaatcctaagcaaaaagaacaaagctggaggcatcatgctatctgacttcaaactgtactacaaggctacggtaaccaaaacagcatggtgttggtacaagaacaaacacattgaccaatggaacagaatacagaactcagaaataagaccacacacctacaatcatctgatcttcaacaaacctgacaaaagcaagcaatgggaaaaagattccctatttaataaatggtgctgggagaattggctacccatatgcagaaagttgaaactggacccttttcttacaccatacaaaaaaattaattcaagatggattaaagacttaaatgtaaaacccaaaactataaaaacctagaaaaaaatctaggcaataccattcatgacataggtatggtcgaggatttcatgatgaaatgccaaaagcaattgcaacaaaagtcaaaattgacaaatgggatctaattaaactaatgagcttctgcacagtgaaagaaactatcatcagagtgaagagacaacctatagaatgggagacaatttttgtaatctatccatctgacaaaggtctaatgtccagagtctacaaagaacttcaacaaattcacaagaggaaaaaaaaataccactaatatctgcaattctactctgtacttccatgagctcaaaaagactttttaactctcacatatgagtgagaacatgcagtatttatctttctgtgcctgacttattttgcttagcacaataacctctgggttcatgcatgttgccatcaatgtgagaatttcattctttgttatggctgaatagtattccactatgtatgtataccaacttttctttatccatttatctgttgatggacacttagattgattccatggtcctggctattgtgaatagtgcagcaggaaacacgggagtgcaagtttctctttgatatactgatttcctttcctttgggtaaatacccactagtgaggttgctggattgtatggtagctttatttttagttttttgagaaacatggaaaggtaacttttgtcctgcattttatgggctgagtgggcatctgaaacataaagaaggggtgaggaagtctaggttattcgctgtgtgcactcttatgtccattctttgcccagctctgccttgttttgtatcctaaggggctgtcttttatagtatacatcatccaggatctcttttggcttccagatggattcacccaatggcagatagagtaggaaattggttagaaggtagtaagagacagagattgagatgtttctttccctgttctgttccacctttgctgaattattctgtcagtggctggcctctctacatctggaatggtaaacttgaggctgatgtgatcatcattatgttttgggaagatagtaggtgacagtgtcaagttagtgaaatgggaaaaaccggactagggggactaaagagtagaaaccattacagtagttcacacaagaggtgagggggtatgtattgagatggtggaggtgggcacgtttgaggtagatactatgagatttagtgatgaattaatataaaacgtaggagaggagatgattgtgacataaagttttatcatttggtgactaagggagttgacaacagaaatatggaaagatggagatgcgggggagaagggaaaagataatgagtttggaataaaattttgaccagatttaggtctttgttaccagatggacattgttgccagaagattattgccagtttatacctctacgtccttgcatttatcaaatacttttaaattattataatgagtaccttgaaaaccttttgtgtgtcttaactactgcacactacttgtattcattcattttatgttgctataacagaataccaccaactgagtaatttacaatgaacataaatgtatttggctcatggttctggagattgagaagtccaagagcatggcactggcatctggcaagggcctctgtgctgtgtcattccatggtggaaagtggaaaaacaagagaggatgagagcaagcgatcaagagtgggctgaactggattttttacaacctgtttgggaaggttttattctattttatacaacctattcccatgataatgacattaatccattcatgagagcagagcccgcctggcctaatcacctcctaacagtcccacctcttaatactataacaatggcaattaaatttcaacacgagttttggagaggacattcaaaccttagcactactgtacaggggttataagatgagagtcattagcaatggaagagttaatctgtgcctctcaaacaatttattgacaataggatgaaggaatcttgcagccaattctttaaaaacatcaaacaaataataagtgtaagtatttttagtgaatacagaagggtggagacaatttgaggcacttcagaataaatgcaaaaatagagagattctgttgtctatataagtttttccaaatttggtattattcctagaaaattttatttttaaaagaataactttatacactattattgaagtcaatttccaatgctaaagtgtgaggaatgattttccttttcctgtcatttgtcaccaaggaggctgcacttgcactgctgtgattatttcaaggtgaaaggtgagaagaaatgttccttatggtttattcagctgggatgtcagtattggtaatctcagtcgctatggtatttgagcctgttggctctgaaaggatttactcttttgcacaaagaaagagcagaatggcagtggtaaagataaaaagaaatgagattcagaaaaagtggatttctgtgtccacaaaatagctttttattcaggaaagctttaatgggaattagtagtattgtttcacataaaggggtagattaatgtggtgccatgaaaggtagatgtatttatagtttaaaaatttatacttctctttgacatcatttggtgaattaaagagtcaaggatgggtataggctatttcttgttattattaaaacatttctattttacatttataaagacacgtataggtttagtttaaatattataccttcaagaactctttaatgtgcttgagataatagaagagagaagatcagtcaatccaggcactgagaaactgcaggtactttcctttctgtgactttattgaagggccaatcctctcattgtttaattacaacttctgaaaatgatggcagcagacaagcttttcagggggtcattttatatgtgctgggaaagttgcaatgaataagaaaatacagtgtcagctgtctagttttcaggcttagagacaaaggcctttagaaatatatagatcttctttttattttaattgcttaagatcttggagatgggattttagatatctgatcccatgaattcattttacagatgagaaaactgagaaactgaggtctggagatgtcaagtaacctgtctgaggtctcatggctagttcatggcaaagctaggacaatttgctttaagctcaatattattataatattaaatattataccttcaagaattctttaatgtgcctgagataatagaagagagaagatcagtcaatccaggcactgagaaactagaagtactttcctttctgtgactttattgagggccttttaataataaatatatataatatttaaaatattaaatgttattaaatgtttaatattttaaatattaaatgttattgtttaatatgtaagatattaaatgttattaagtgtttaatatgtaagatattaaatgttattaagtgtttaatatgtaagatattaaatgttattaagtgtttaatatgtaagatattaaatgttattaagtgtttaatatgtaagatattaaatgttattagtgttcaatatgtaagatattaaatgttattagtgttcaatatgtaagatattaaatgttattaagtgttcaatatgtaagatattaaatgttattaagtgttcaatatgtaagatattaaatgttattaagtgttcaatatgtaagatattaaatgttattaagtgttcaatatgtaagatattaaatgttattaagtgttcaatatgtaagatattaaatgttattaagtgttcaatatgtaagatattaaatgttattaagtgttcaatatgtaagatattaaatgttaagtgttcaatatgtaagatattaaatgttaagtgttcaatatgtaagatattaaatgttattaagtgttcaatatgtaagatattaaatgttattaagtgtttaatatgtaagatattaaatgttattaagtgtttaatatgtaagatattaaatgttattaagtgtttaatatgtaagatattaaatgttattaagtgtttaatatgtaagatattaaatgttattaagtgtttaatatgtaagatattaaatgttattaagtgtttaatatgtaagatattaaatgttattaagtgtttaatatgtaagatattaaatgttattaagtgtttaatatttctggggcatcacagaactcactctggacacagcagaagaaaagtgaagaaaagtggagaggaagggtgctagtagggccactcttctacactacagtctttgggcttttaaaacttaacattcacatttactgttgtgtcaatgtagagctcactatctgtttaactgtgaaggttaaagtcagaaaatcagatgagtgaagtgaaaaaggaagaggagtgatgtgtgagtcagaagcttgcttacttggacttttacttgttgtgggatttggggtagttacaacttctcaggagttcaggttcctcagctaacactttggtatcatcatgatggatatttcttggccacccaacatccatttctccttttttggtgacaaaacttgatttccttttggggattttctcctcccatttggagagactgtcatatatggtgtcctgcctttttctggccaaggggtagacacgtctttcaaactagctgatcagagtctctctctggggctttatttcctgagagaattaccataggttagaaaaacaaagcaaaacaaaaaaacactttttatttctggctcatggtggtgattccctgtgagatatccatcagttcttcctacttggatccatggagttacctttgtttctgtttctacccagataaatagatatttcctctctagctttccttcagttctttgaattagctcagtatctttctgtcatttcaagtttctgcttaatttagctagatttggttttttttgttttttgttttttttttgagatggagtcttgctctgttgcccaggctggagtgcagtggcgcagtctcggctcactgcaacctctgcctcccgggtgcacgccattctcctgcctcagcctcctgagtagctgggactacaggcgcccaccacaacgcccggctaattttttgtatttttagtagagacggggtttcaccgtgttagctaggtgaaaccccgtctccttacctcacgatctcctgacctcatgatccgcccgccttggcctcccaaagtgctgggattacaggcgtgagccaccgcgcctggccactagatttggtttctattgcttacaacctagaatgatatacactcataaagttatcatgaggctaaagtgaaaagtaggcctcaaatcagttggatattatttattatatatgcacattacatctttcattcttcagtgctttctaaattgtgtattttagaggttctgatatgtaggctgtttggtattacatatctcagtcaactgggtatagtgcatgcctttagagtctgtgaatttttggctagaaagttaataccctccatcccattatttaaggttcaagaatagacagaatattaattctttagggagggaagacagtaaagaaaaaaataagcggtcgggcacagtggctcacgcctgtaatcccagcactttggaaggccgaggcgggcggatcacctgaggtcaggagttcaagaccagcctgggcaacatggtgaaaccccatctttactaaaaatacaaaaattagccaggcatggtagtggcgtgcgcctgtaatcccagttacccaggaggctcaggcaggagaatcgctggaacacgggaggcagaggctgcagtgagccgagattgtgccactgcactccagcctgggtgataaagcaagactccttcacacacacacacacacacacacacacacacacacacacaaaagaaagaaaaaaataagcataacgtctcaaagactgccaagaataactgggcagactaggttaggccagagaggtgcctataagtaggggctctgctttctcacgtgggatgatgtcaaacatggggcctgaagccaaatgaagaatttgagagctccagagtttgttttgctctccaggtactcgatgtttgtgctgttcatgtccagagatgactatcgtttgtattcctccctcatttccttgtcattccttttctgcagctgtctagagtaaccttctaaaatgatattgtgacctcctagatgttggcaagacccctgtgagacacagtgtacacactttgatcatttgatcattttgagggagaatgttttatataaacacataaggcagtggttctcaagctttagcgagcatcagaatcacttaaggagctcatgaaaatgcagatttttcgactccattcctggagtttctgactcatttagtctagggtaaggtctaagaatccacatttctaaccgcactactaatttggggatcaactttgagaaccacaaatgtagggtaacaatttgaaaaataattgacatgcttatcacttacattttggggtacatgaccttgaggcagaggagaagattaaattaggattgtaactgcaagggtgcaaagagaaagaaaatgttaatagttaggtattaccaaaatagaattttcaagcatgcagcaaggtaacaggctcgaaagtgagactaggttggcaaagaaaaggagtttgtaaattcttttatctcctcttctaacaaataaagaggcaagcctgatgaacctaatcttggagtatttgttttgtttatttgattatagagtcttagatatagaaggtcttggcaaaacagtaagaaaaaaagggaaaagttgtgtttttttaaccctggtggactgagggtgggaaagccaacgatcggatgtgtggctttctctaggccgaagtcttagggagtgaggtcatagacctagggaccccttccctaattcccattgcagtctggagggagataacctcaacaaccttcatagccatatcaaaatcatcttggaggttcaacatagttgggcagagagaggatctgagtttaggtaacttgaatctccattagatcctatgtagtgtggaaagaatccagaagttccactgtgctctatggagggagggggaagctagttgaaggtgctgattggtaggcttatttgaagggttcttccatgtgatggggaccaagtccacagaagggctgcaaggtagatacctggattggagttgaactgggagtcccatgctactttaggacccagtgagaattaggatgggactcagttaagcaagaggaggtgactggtgctcaccagagcactgccccagccaagaaaacacctgtggccttcagcagaagcagatgtccacagaatgatcaggggttggaccagtcataccaaactggtcagcaatccagagagcaaccagaccagccacgtttgatagagagcaacaagagcccagaagataacttaatgttcccctctaacaccattaggccataaagccatgtttctgtcccatacacttctatgctttctttgagaggagtgggagggctcagacctttaaaaaatagagatttacttgaatttcttaagtaaagactgagctgagttattggttttaactgaggttaccaaagaggactagtgtcttatcctcccttctccaccctgcctccacattcctgccctcgccactacagttacagagaaattaaaaaacctttcattgtacaactgagggtggaattgttggcttatatattggaaaaattcaagagtatcaggtactgttgcatctagggattcaaagaatgtttctaggattctctttccatttcttaggtctgttttattccatgttaactttatttttaggcagaatgtaatgagtggtggtaaagagggttaccagcagctcattatgcttagtgatatcttagcatcctgatcaaccctctaaaaggaccctggccatgctgggtaacatgccctcccacatgatgccaagagtcgggctatataactgatatcctcacctgctgggtgaggagccttttttttttcaaaacaaaacaaaacaaacaaagcaatgctaggctaacaaatgtaataggtgttactagttgtggctgtagactctactgttttcatgattttgcctgatggctgagagaaaacaggctacataaaattatgaggaagtaccccagccacatttgcatatgtgttcctggaatttgaaatcttcaagaggcttgctaagggagttggaggaaccaggtctcccccatttgtgacatcacataattttgagtgcagacaaaaagtctttgttaggaaaatactagagacatgatgccattagttagcttaattctagtgtctgccaggttttccaccctccttcttcacttggttaactaatcctttaagacttacttcaggcagaacctcctctaggaagccttccctttgctgcattaagtgtctttctatgactcccataatgtccctgtgaatgtgttcacataaattattgtctaaatcaggacagatttgaaattgaaattaacactaattttaaaaattaggctagaataataggaatacattggattgtcttgggcaacgggatgcatggttcttctacttttcgatgccctactatggtaattgcttacttgtctgtcttcccaactagctggtgagccatttgataatggagattatttcttattccaagtgctcaacagagtgctgtcaagtgtttgtttaatgttaaacaaagaagctccctctagcccttgaggagtggcagatttacttagtctctctactctagagagtgaatacatccttcaggtgcatttgatcatttcctttcctttgcttaatctggatgttggcatatatatctatacacacacacgcatatgatcttccttccatgtttctccaatgtgtatgaggctaattacacgattctatttagcgagatctgaaccaccaacaaaagagaatcaggctgcttctactaatgtttagatccggtaactaaccccttcctttggctttatttgaaaattcttatttcatatatatcacactataaaccaacagcctaaacatagtaatagcttaatttattttgctttttttatggcagggttgtatataaatgcatttcaaaatataatcttctaaactcatagatattcataatcatttagaaatgataaaaaagttgtcaaatacttgtaattatataaattgtcactcaaattacaggaagcttagaaaagctttattgctgtttagttttgtttgaatgctcctgagtgtgctattgagagctttgataaatcaagagggctgaaagatggaaatggtcatagtgtttaagttgtgttacacttaaatccatttaattaactattttcacaaacatggtgttcttttgtaagaaacatttttaaaaatcattctgttctgtgttttccttcacagaataaaaaaaaattatccctgcatgcttttgtatttctcattctttggttttcttccaatgcatgtatataattatatgttcatgttgtcatggtgattcagggctagaattgtgactgttgtaatcacttgcctaagcctggaacccgctgtccagcacagcaaaatcagcaatgtaatggtagacagtcaatgtattcttttatatgaattaatctgttgttaagatattcctgaaaatattttttcaactgccagaatttacttgataaatatatagtatcaatatgtattacagaatttaaaaatgtagtttctcagctctttacatttaatttcaatatggtcctcatgatttttgagtcacattaagtcagatggtacctttcttgccagatgacctgggttttttttcctcctaaacatatagtttcttcaaaaggggaatatatatattttaaatttataaaaataatacatgggcattttaaatacccaaaaagtacatcaatttataaaataaaagttttctccactttagtccttcctcactcttaataccacaagataaatagcattatgactgcaaatatccttctaacttttttttactatagactaaatcacactttataaattgttcaccacctgatttttttcactcagtgtatcactgatgactttaatgtcagtgcatattgatctactttatacttttaaacatctgcatagttttctattgcacagatatagtacaatatctttgataagttccccagtgcctgacacttatattttaaactataccacaatacagaaaagtgcgtaaaatatatagttcaatgaataattaaaaaacaagcaccaggccgggcactgtggctcacacctgtaatcccagcactttgggaggccgaggtgggtggatcacgaggtcaggagatcgagaccatcctggctaacatggtgaaaccctgtctctactgaaaatacaaaaaattagctggccatggtggcaggcacctgtagtcccagctactcgggaggctgaggcaggagaatggcgtgaacccgggaggcggagcttgcagtgagccgagatcgcgccactgcactctagcctaggcgacagagcgagactccatctcaaaaaacaaaacaaaacaaaacaaaacaaaacaaaacaaaacaaaacaagcacctatgtaaactgccacccacatcaagaaatagaacatgattttaactctataagctccctgagttgatcatcacacctcttttcttatcttagaagtaaccactatgctgattttggggaaaattatttgtgagtttcattagagttttccaattatgtatgtctcttattcagaattgcctgttattgaactttgtataaatacaatcatcatgtattccttttgtgtatgacttcttttgctcagcattatgtttgtgagattcaccaatgtggttttatgtagcttcataatagtttgtcatataaacataccatagtttaaatttgggctgtttgtagcttgaggccacaataaacaaaattattgtgaacatctttgtatatatgtcttagtgtgtatatgcaaacttttatttagggtatattctcaacatgtaaacattggataatgtcttcaatctcactagataaagcacacaaaggcatacaaaaaattgagaagagttttttttttttaagaaaaatactgaccatttcataaaaacagtcagactttgtggcattttagcctggtgctcctttcattcccatccccctccccagctctatcagcatggtagctctactagagtagggctaactgtgagaaccggccgcttttctgctggaagaggctaacttgatttttgtgcagtatgaaaaaaaacctatggcactaggcattgtcagaaacagtagcaatctaagtgggaaatgaacagagaaggccaacatcaccgataacatgaggctgtgatcctagtttgggcaaggaacagactagcaaactagccagaaacctagtagagttattcagggaatgagacagccttggttgtcacctataagctcccctatattcctggtgggatggaaatctatggatagaatattctgcagctaaaaaaaggattgagatcatgtcctttgcagggacatggatggagctggaagccattatcctcagcaaactaacacaggaacagaaaaccaaacactgaatgttcttataagtgggagctgaacaatgggaacacatggatacaggtagatgaacaacacacactgaggcatatttgggggagtgggtagggggagggagagcaccaagatagacagctaatgcatggggggtttaataccctggtgatgggttaataggtgcagcaaaccaccatggcacatgtttacctatgtaacaaacctgcacgttctccacatgtatcctggaacttaaaataaaataaaataaaattaataatggacatctcaaaaacaatggaggccagaagacaatgggatgatatatttataaaaagagaggaaattcagcctcatcaagacatcgtgtcctatctaaggggtgaaaaaaactgagaagcactggcaaagttcacagtctagggtcacatgctcatcgaaagactgagacctaatcacaggactaaataatgcttcccctctcccacaccttaccacattactaaaggactatttgccatgtttcttttatgcagtgtatcatgtctggctatcaataaaaatttataaagtcatactaaaggcaaaaatattgtttgaagagactaaaaaagcatcagaactagagttagatatgtcaggaatgttgaaattatcagaccaggaattttaaaaaacaatgcttcatgttccaagggctttaatgggaaacagtagacaacatgctaacactgatggatattgtaagcagagagatagaaattttaagaaacataaaaaagaaatgctagaaataaaaaacactgtaacagaaacaaagaatgtcttcagtgagctcattagtagattggacatggctgactgagggtcatgagatgacccttgctatccatatatctctggttgaatgtgatgtgttatgaatgcacagaagataattgatattgcttagcggaaaatacaaactgtgaaaaacttgtaaattggagaatggataagtacaggtaaaattttaaaaattacttttcttatttttaattgatttaacataacaatttgttcaaaataataacagcaacaatataattgaatatatatgtgtctgtatatatatgtatatatctacacatatatacacatatgtgtgtgtatgtatatgtatatatgtatgtataagtaaaataaatgacagtatgtataagtaaaataaatgacagcaatgatacaggggataggagagtggaattagaattatttcattattgtaaggtacttgtaatacccattaagtgggataatgttatttaaaagtagacttggattagttgtaaatgtatattaaaaattgcagggcaaccacttagagaatacaggaatataattggtaggccaagaaaggagaaaaaatagaatctaaaagatatttaaatatgcaaaaagcagaaaaaatatggaagacaaaaataggaacaaagaacaaagacaaagaatagaaaataataacaaatctggtatatagtaatccaattactatcaatgaacttcttaaacatcaatggcataaatatgttagttaaacaacagattgtcagaatggattaaaaaatgacccaattacatgttgtctagaagaaatacactttagatatataaagacacatacagatgaaaataaaaggatggaaaaaaaacagaacatgctaatattaatcaaaagaaagtggggctgagagtgatggttcaagcctgtaatcccagtgctttgggagaccaaggtgggtgggttacttgagcttaggagttcaagaccagcctggacaacatagtgagatcttgtctctacaaaaaataaaataaaactcgcctgctgtggtagtgtgcacctgtagtttagctactttgaggggcagtagctgtattattttcagacaaaatagacttcaaagcaacagagcaaggaaagttattggggataaagggaggtattacacaatgataaagcagtcaatatttcaagaagacaattcttaatgggcatgtgcaaaaattggtagaagtgcaaggagaaatagatgaatctgctgttaaagttagagacttcaacagccctctataagaaatgtacagatctagcaggtagcaaatcagtaaagacatagtcgaacccaacaacatcattaagcagctggacataatggacatctacagacaacttcatcccagaacagcataatacacatttttctcaagcttacaaggaaccaagatagaccacatcctaggccacaaaacataccttaatacatttaacaaatagaaaccatacaatgtctatttttcaggccacaatggatttaactagaaaacaataacagaaagatagtcccccaaatccccatatacttacaggttaaacaacacacttctaaataccacatggttaaaagaagaaatttcaagagaaatttaaaaatattttgaagtcaataaaaatggaaacacaactgatcaaaatttgtggaatacagtgaaagtagtgcttagagggaaacttatagtattgaatgtgtataccagcaaataagaaagatataaaataaataacctaggattccaccttaggaaactagaaaaagaagagaaaattaaatccaaagtaagcagaaaaaataaatgataaaaattagagcataaatacataaaattgaaaacagaaaatcagtaaagaaaatcagcaaaacaaaaagctggttccttgaagaccaataaaattgatgtctctaggcaggttaactaagaaaaaaagagaaaacacaatttgagaatatcagaaatgaaagacaagacatcactacagagtccatagatattaagagcataaaaaaggaatattaacaactccatacccacaaatttggtagcctagatgaaatggaccagtttcttgaaagacacaatctgccaaaactcactcaagaagtaatagacaatttgaataggcctatatctattaaattcattaaatcagtaattaataactttccaaaacagaaagcaccaggtccaaatgagttcactggtgaattctacctaacgtttaaggaaaaaattgttccaattctctataatctcttccagaaggtagaagcagaggtaactgtaaccaagtgggatatattcctggtatggaaggatgtttcaacatatgaaaataaattaaggtaattaattacatcaacaggctaaagagaaaatcacatgattatatcaatagatgcagaaaaggcattttatgaattccaacacccgttcatgataacactctgcaaactagtaataggaacttcctccacttgataaagaacatctacaaaaagcctacaagctaacatcatacctaatggtgagaaacttgaagtttttccactaaggtcaggaaaaagtcaaggatgtcccctttcaccactgcttttcaacattgtactggaaggcctaactaatgcaataaaaggctatgaaagctatgcagactgggaaggaagaaatacaactttctttgttcacaggtggtatgatcatctatttagaaaatccaaaaaaaaaaaaggacaaaatcacttctggaactgataagcaattttagcaaggctgcaggatacaaggccaatgtgcaaaagtcaattgctttcctatagaattggccttccagactatacaatcccagatgagtatagaattggaccatatcagcccaatgttcctgttggtatggactatgtgatacctaaaacagggttttacggtaagctgtgttcattcttttatacaaatgaagaagttgcaaagaatactcattgcagcagccttcctcattatcagaaattaaataaatttctgaataaattggcagaagaatgcagacagaagaagaaaacttaagaagtgcaagtagatttaatgatttcaaagaaaatagtggttctttgtttttaatgttaaccttttttaaatacaatactgatagaagaaaactattgtactcttttgttttagtggagaaataatagatgtctgttcatgtgttaaatgttatagcaaaaaaaaaaatacacatatggttaagttaatgaatagtttttgttttatcagaatggcaacggacagaagtactttgcagagattgacttcctaagctacttaagacaacttgcaccactaagaaaaaaatgtagaaccatttggaaaaatgaaatttagtagttccaagtttcaaagaaatgtcaacattttattccattcaataaagaacaaaaccaatagtatttttattactttcatctgaaacattccatgttttaatatggaaaaaaaaaaagaattggccctccatgttggtggtttccacattcgtggattcaatgagctgtggatcaaaaatattcagaaaaaagatggttatatctgttctgaacatgtatggactgtttttggtcattattccctaaacaatacagtataactatttgtatagcatttacattttattaagtattataaataatctagagaagatttaaagtatttgagaagatacgtataggttatatgcaaatactacaccattttaagggacttgagcatccatgggttttggtatccacaggggtcctggaagcaatccctcagatactgaggaatgactataccggcaatgaaaaagtggaatttgaaattaataatatattaacatttacactagtagcccttaaaatgaatacttggagaaataaatctaacaaaataagtacaagatctatatgaggaaaggtacaaaagtctgatggaagacattaagaataactcaaaaaaaaaaaaaggagaaatattccatgtacatggataggaagactcaatattgtcaagatgttagttcttcccaaattgatttataggttcaatgcaatctcagtcaatatcccagtaaattattttgtggatatggataaactgattttaaagtttatatgaaaacgcaaaagccccgtaatagccaagtcaatgttgaaagagaagaacaaagtcacaggactgacactacctgacttcaagacttactataaagttacagtaaccacgaccatatggtattggtgaaaagacagacaaacggatcaatggaacagaatatacagcccagaaatagaccacataaatatagtcaactgacctttgacaaagaagcaaaagtaatagaatggaaaaaagttagtttcttcaacaaatgatgctggaacaaccggacattcatctaaaaaataaatttagacacccttgacaaaaatgaactcgaaatggatcatagacctaaatgtaaaacatgaaactatgtaactcctagaagataacgtagaagaaaaccaatatgatcttgagtatggtaatgatattttagatataaaaccaagggcatgatccataaaagaaacaactggtaagctgggctttataaaattcaaaatttctgctctgtgaaagacaccatcaagagaatgagaagataagccacaaattgggagaaaatatttgcaaaaaacacattgataaaggactgctatctgaaatatacaaaataccttcaaattcaacaataagaaaatgaacaatctgattaaaaatcagcaaaagaactcaacagacacctcaccaaagaatatttacagattgtttttaaaaatatttatttatttatttattcagtaccgttaggagtgcaagagattttgggttatatgcatgaatggtatagtggtgaagtctgggctttcagtgtacctgtcaactgaatagtgtatattgtacctaatagataatttttcatcccttaccccactcccactctcccccttctgagtctccagtgtccattatgccactctatatgttactgtgtacccacagcttagctcccacttataagtgagaacatgtggtatttggttttctattcctgcacttaaacataggaaaagatgttcaacattatataccattagagaaatgcaaattacagcaagataccactacagacagcttagagtggccaaaatcaaatactggtgaggatgtgaagcaataaaaactttcattcattgatgatgggaatacaaaatggtacagctattttggaagacagatttgcagtattttacaaaagtaaacatattcttaccatatgatcccagcaattgtgctccttagtctttacccagattagttgaaaacttatatccaaacacaaacttgcacaaatatcgctatagaatctttatttaattgtcaaaacttggaagcagctaatatgtcctttagtaggtgaatggataaataaactgtggtatatccatactacagaatattattcagcactaaaaagaaatgaactaccaggccatgaaaggacaagaggaaccttaagtacatattactatgtgaaaagaaccaatctgagaatgatacatattgtgtaattccaactatatgacatactgaaaaaggcaaaactatggagaaagtaaaaagcttagtgattgccggggatagaggggagggaggaataaataggtggagcacaaaggatttagggcagtgaaacccttctgtatgatactataatggtggatcatttcattatacattgtcaaaaccatatgctatacaatgccaagtgaaactctcatgtaaactatggacagagtgatattgatgtgtcagtgtaggttcattgactgtaacaaatgtaccactttagcgtggaaggttgatagtgggggtttatattagggtttctctttgtgttgtatataacatgggttttgacaaatgtataatgacatgatccaccaatattgggttttgacaaatgtataatgacatgatccaccaatattgggttttgacaaatgtataatgacatgatccacccttatagtatcatacagaatcaaaaccacaatgtgataccaccttactcctgcaaatatgaccataatcaaaacattaaaaaaaatagatgttgatgtggatgtggtgaaaagggtacacttctacactgctggtgggaatgtaaatacaaccactatggaaaacagtgtggagatttccttaaagaactgaaagtagatctaccatttgatccagcaatcccactactgggtatctatccagaggaaaagacatcattatacaaaaaagacacttacacacgcatgtttatagcagaacaacttgcaattgcaaaaatatggaacaagcccaaatgcccatcaatcagcaagtggataaagaaaatgtggtatgtatatatatatatatatattcatgtatagtatggatatatagtatatatatagtatatatacagtatatatactatggatagtatatagacggtatatagacatactatggatagtatatagacggtatatagacatactatggatagtatatagacggtatatagacatactatggatagtatatagacggtatatagacatactatggatagtatatagacggtatatagacatactatggatagtatatatacggtatatagacatactatggatagtatatatacggtatatagacatactatggatagtatatatatacggtatatagacatactatggatagtatatatatacggtatatagacatactatggatagtatatatatacggtatatatactatggatagtatatatatatacagtatatatatactatccatagtatatatatacagtatatatactatactgtatatatacagtatatatactatactgtatatatactatccatagtatatatatatactgtatatatactatccatagtatatatatatactgtatatatactatccatagtatatatatactgtatatatactatccatagtatatatatactgtatatatgctatccatagtatatatatactgtatatatgctatccatagtatatatatactgtatatatgctatccatagtatatatatactgtatatatgctatccatagtatatatatactgtatatatgctatccatagtatatatatactgtatatatgctatccatagtatatatatattgtatatatgctatccatagtatatatactgtatatatgctatccatagtatatatactgtatatactatgtatatatagtatatatacatagtatataatagtgtgtatatatatagtatatatacactatatatatactatagtatataatagttttttatatatatatataatattcagccataaaaaggaatgaaataatggcatttgcagcaacctggatggatttggagaccattattctaagtgaagtaactcagggatgaaaaaccaaacattgtttggtctcacttataagtgggagctaagctatgagaacacaaaggtataagaatgatataatggactttgagaactcggagggacaagtgggaggggtgaggaataaaagactgcacattgggtacagtgtacactgcttgggtgatgggtgcaccagaaactcagaaatgaccactaaagagcttatccatgtaaccaaacaccacctgttcccccaaaatctactgaaataaacaaataaacaaacaaattcaaaaacccagggaaacacacccccctagagctgcaaaaaaacccaaccaaacaaacccacaatgagatatcacatactattaacatgctaaaaaataatcaattcaagatggattaaagacttaaacattagacctaaaaccataaaaactctagaagaaaatctaggcattaccattcaggacataggcatgggcaaggacttcatgtctaaaacaccaaaagcaatggcaacaaaagccaaaattgacaaatgggatctaatttaactaaagagcttctgcacagcaaaagaaactaccatcagagtgaacaggcaacctacaacatgggagaaaatttttgcaacctactcatctgacaaagggctaatatccagaatctacaatgaactccaacaaatttacaagaaaaaaacaaacaaccccatcaaaaagtgggcgaaggacatgaacagacacttctgaaaagaagacatttatgcagccaaaaaacacatgaaaaaatgctcatcttcactggccatcagagaaatgcaaatcaaaaccacaatgagataccatctcacaccagttagaatggcaatcattaaaaagtcaggaaacaacaggtgctggagaggatgtggagaaataggaacacttttacactgttggtgggactgtaaactagttcaaccattgtggaagtcagtgtggctattcctcagggatctagaactagaaataccatttgacccagccatcccattactgggtatatacccaaaggactataaatcatgctgctataaagacacgtgcacacgtatgtttattgcggcattattcacaatagcaaagacttggaaccaacccaaatgtccaacaatgatagactggattaagaaaatgtggcacatatacaccatggaatagtatgcagccataaaaaatgatgagttcatgtcctttgtagggacatggatgaatttggaaatcatcattctcagtaaactatcacaagaacaaaaaaccaaacaccgcatattctcactcataggtgggaattgaacaatgagatcacatgaacacaggaaggggaatatcacactctggggactgtggtggggtggggggaggggggagggatagcattgggagatatacctaatgctagatgacgagttagtgggtgcagcacaccagcatggcacatgtatacatatgtaactaacctgcacaatgtgcacaagtaccctaaaacttaaagtataataaaaaataaataaataaaaacagaaaaaacaaaaaaaacaaaaaacaaaaaaaataaatataaatacatgaaaaataacaacaataccaagtgctggcaaggatacagagcaactagaaccctcacacattgatggtggagaagaaaatggtacagccactctggaaaacagtgtggcattttctcataaagttaatcatatgcttaccatatgacccagcaatcccactcaaagtgtctacccaacagaagtgaacacttatgttcatacgaaaacctatacataaatgtttctaatagctttattgataattgccaaaaactgaaaacaacccaaatgttcttcaagtagtgaatggatgaacaaaccatcataccttcacaccatagaatgctactcagccaataaaaaggaactattgatatatgcaataacatggatgaatggcaaatgtattataatacatgaaaggagccagactcaaaaggctacataattccacttacatgacactcttctggaaaagacaaaacaatagagacagaaaacagaccagtggttgtcatgggttaaggtagggtgagttaatgaaaggagcaaacaagagaattggggtagagagcaggaatggaactgctctgtgtcttgattgtggtggttatacaactgtatgcattgtcaaaattcatggaactgttcaccaaaaactatgttgcatttacttgtatatgaattttaaaagaaatttttaaaagttttttaaaaaggaaagaagagaaaagcttcattttaaacttgattagctggtcagaaattattaactggtcttcattttttaaaattgcctattttctatttcctctgctaaaattaagctccataagaacagaagctttgtatggtttgtctgctgatgtatctccagcatctaaaacagtggtgacaagcacagcaatgaactcactgaatgtttacttagtgcatttcatatattttatcttattagatgcttaaaacaactcattgaagtagatactgtcagtatccccattttacagattaggagactgagacccagcaaggttgggtaacttgtcccaaaccatacattattaagaggtggagccatgatttgagcccagtcaatttgattggacccatacctttcactactagtgtagacacttggctaaagggcacaggagcaagaaaaaacatacctggataaaacgaagagaacaaagagaatctggaacttctggctagatgcagaaatctgacatagctttgggttgtttccctcaggcaaggagagctttttctctgtttttatgtattgtgtgcatgtgggttagttgtattaagtatgtgagaactggcagagagtgcaatggacttctacggtttttatctgcccagtaaatcctcttcccttcttttggcaatagacatgtccacttccttgctttgagcattgttttcccctgtaaggtcatgctgtttctcctgcttatgtgggcctgtccattagaacatttccctgggattcttatatactagagtaggaaagagaagcccatcctttcttcttctgcataagtgtatttggattggcactttaacttagaattctgtgaagcagtagggaattattcaagattgactgagcccatattatggaatgaaattagacacagttcacaatagaattaagttaagcaaaactcgtatgcattaaactacaataattatgctggctttaatttccaattatctcctaattaaaaagcattaggaaaaacatttagacatacatttggacaaatgtgactgttcttctggtccaagagaaatccctttcttgtgctaaattccactggtctgtgaggtcttcagcattcttgtcttaggagtctctgctgggattagttatttcctttcatcagagcacttaatatttatagcaggctgaaatatgactctccaaagatattaggccctaatttttggaacccgtaaatgtcactttatttgggaaaaaaagtctctgcagatgtaataaagaatcttgagatgtggaggttatcctggattatctcagtgggacctagagtatcatcatatgtatccttctaagagagcttttacacatacagagaagaaggcaatatgaaacagagcagagagatttcaagatgggccttgaggactggagtgatgcagccacaagtcaaggaatgtgggcagccacaagaagctgaaagaggcaaggaatggattctctctacaatctctggaggacatgcagccattccaatccttgtttttcatctaataatactgatttcagacatttggcctccaaaactgtagggaataaatttctgtgtttttaatttttttttttttttgtagagatggaggtctcactatgttgcccaggctggtctcaaacttgtggcctcgagtaatcctcctttcttggcctcccaagacactggaattacaaggcatgagccaccatgcctagcctaaatttctgttatttaagccaccaaaatttgtggtaatttggtatttgtttcaggtaatagtgctgtattagctgtattagcactattacctgaaacaaataccaagttcctattcctatttatcctatttatcccaaattcctctggatacaaaatttttatcaatagcattgcaattttctctaaaaagattttgcaaaatgctaactgcctgctctatttattgactcacatggcagtgcaagtttgtacttctctctcaccctttctttccctctttccctctctcttaccagcatactctttgttctggctttgtgatgctttattttggtctgtttctgtgttttctgtccttctgagacaaattaggagtcttattcttgtttatcttataaaaaagataacattattattggaggtcaaacggatatggatttcctaatgagaagaagtgagaatgtcccccatggttgcaaaggcctgatcgttactgtttcatcattttatgtttaataccataaaaggaacactttcttcctgagatgtcttaagatttttttctatacttggaaataaatgtgggtatccaggatgaaaaggcctaggataaaatcccagttctcacacttcttaattgtgtgacctcttgtaaagtgcttcgcttttacctaaagcgttggaatttctcatctataaaatagggatagcagtaaggttgctgtaaggagtagagaagttaatgtattcagatcacttagaacagtacccggcccatagcaagtgcttgacaaatgctgctgttatcatcatcatcatcaacatcatcattgtcattgtctagcatgagggctgtactatcttatgtgtgtctgcatctgagcagggacagttgacttaccatctctttaaactggcactcctactgtaagtggtaggcccaaggaaggacatgcctttcttttcacatctgaccaggagggattgataaaaggctttctgtctgaggtgtgtctcatttttactagccattattgtctgttagaaacaataatttggttgaattacttaaaataatatttgaatttctcaatttcattttgtagtatagacattcacacaaaattttcacaaaccagatttgaaatcaagggattataattttgttatatccattcattcaacatgtatttactgaactcctatggagtgcccagtcctgtgctaagtcctgggggcatagcagtgaacagaatgctaaatcatgcaggaaatcaaagtcctgggaagaagtttggattttatcctaaatgcagtgggaaaccttggaaaggacttaggccatggagttttaagagtgtaactttatttttgcttttaaggatatttttaaaaattcattgtggtaaaaacacttcaaatgatatctaccctctgaacaaatctgtaagtgtagaacacattattgttacttagaggtacaatgttgtacaacagaatgtatttatctagctggacagaaactttaggttgttagattagtaactccccatttctccatccccacaacctctgcaaaccactgtttcactctctgattctacgaattgactatttttgatgccttatataagaggactgcagtatttctttttctatgacttgattatttcactttagcataattttctcaaggttcatccagcttgccacacattgtagaacttccctctttttctttctttttttattttattttttaattttttgagacagagtcttgctctgttgctaggctggagtacagtggcatgatctcagctcactgcaacctccgcctcccgggttccagcgattctcctgcctcagcctcccaagtagctgggatttacaggcacctgctaccacacctggctaatttttgtattttcagtagaggcgaggtttcaccgtgttggccaggatagtctcgatctcttgacctcatgatccgcccacctcagcttcccaaagtgttgggattacaggcgtgagccctgcacctggccgaacttccctttttttcttaaagctgaatagtattccattgtaaatatattccacattttctttatctactcatctgtccatggaaatttagtttttttccacatcttcgctattgtgaataatgctgcaatgaatatagggatgctatccttatttcaattatgtgaatacattcccagaagtgagattggatcatatagtagttttgtttgtttgtttgtttgttttgagacagagtctcgctctgtcacccaggctggcatgcagtggcgcaatctcagctcactgcaacctccacctcctggactcaagcaattctcctgcctcagcttcccaagtagctgggattacaggcgtgtgccaccacacccagctaattcttgtatttctagtggagacagggttttgccatgttggccaggctggtctcgaactcctggcctcaagtgatcttcccgccttggcctcccaaagtgctgggattatgggcatgagccaccgcacccagccagtagttctaatttttaattttttgaagcacctctatactattttccatagaggcatcatcattttgcattcacaccaacagtgtgcaagggttccaatttctatgcatcctttccaacacttgtattttgcttttatgatagtagccatcctgacaagtatgatgtgatatctcattgtggttttcacttgtatatttctttttttttttattatactttaagttttagggtacatgtgcacaacgtgcaggttagttacatatgtatacatgtgccatgttggtgtgctgcacccagtaactcatcatttaacattaggtatatctccaaatgctatccctcccccctccccccaccccacaacaggccccgatgtgtgatgttcccctttctgtgtccatgtgttctcactgttcaattcccacctatgagtgagaacatgcggtgtttggttttttgtccttgcgatagtttgctgagaatgatggtttccagcttcatccatgtccctacaaaggacatgaactcatccttttttatggctgcatagtattccatggtgtatatgtgccacattttcttaatccagtctatcattgctggacatttgggttggttccaagtctttgctattgtgaatagtgccacaataaacatacgtgtgcatgtgtctttatagcaacataatttataatcctttgggtatatacccagtaatgggatggctgggtcaaatggtatttctagttctagatccctgaggaatagccacactgacttccacaatggttgaactagtttacagtcccaccaacagtgtaaaagtgttcctatttctccacatcctctccagcacctgttgtttcctgactttttaatgatcgccattctaactggtgtgagatggtatctcattgtggttttgatttgcatttctctaatggccagtgatgatgagcatttttttcatgtgtcttttggctgcataaatgtcttcttttgagaagtgtctgttcatatccttcacccacttttgatggggttgtttgtttttttcttgtaaatttgttggagttcattgtagattctggatattagccctttgtcagatgagtagattgcaaaaattttttcccattctgtaggttgcctgttcactctgatggtagtttcttttgctgtgcagaagctctttagttaaattagatcccatttgtcaattttggcttttgttgccattgcttttggtgttttagacatgaagtacttgcccatgcctatgtcctgaatggtattgcctaggttttcttctagggtttttatggttttaggtctaacatttaagtctttaatccatctcaaattaatttttgtataaggtgtaaggaagggatccagtttcagctttctacatatggctagccagttttcccagcaccatttattaaatagggaatcctttccccatttcttgtttttgtcaggtttgtcaaagctcagatggttgtagataagagctatctatgacaaacccacagccaatatcatactgaatgggcaaaaactggaagcattccctttgaaaacgggcataagacaaggatgccctctatcaccactcctattcaacatagtgttggaagttctggccagggcaatcaggcaggagaaggaaagaaagggtattcaattaggaaaagaggaagtcaaattgtccctgtttgcagatgacatgactgtatatctagaaaaccccatcgtctcagcccaaaatctccttaagctgataggcaacttcagcaaagtttcaggatacaaaatcaatgtgcaaaaatcacaagcattcttatacaccaataacagacaaacagagagtcaaatcatgagtgaactcccattcacaattgcttcaaagagaataaaatacctaggaatccaacttacaagggatgtgaagggcctcttcaaggagaactacaaaccactgctcaataaaataaaagaggatacaaacaaatggaagaacattccatgctcatgggtaggaagaatcaatatcatgaaaatggccatactgcccaaggtaatttatagattcaatgccatccccatcaagctaccaatggctttcttcacagaattggaaaaaactactttaaagttaatatggaaccaaaaaagagcctgcattgccaagtcaatcctaaaccaaaagaacaaagctggaggcatcacactacctgacttcaaactgtactgcaaggctacagtaacaaaaacagcatggtactagtaccaaaacagagatatagaccaatggaacagaacagagccctcagtaataatgtcacttgtatatttctatgattagtgacttacagtattttctcataaacctgttggccatttgtatgtcctcttcaaagaaatgtctgttcaagccattagctaatttttaatcaggttgtttacttatttattttttactactgagttgtaggagtttcttacacattttggagattaactctgtattacatatttactttgcaaatattttgtcacattctgtaggttgtcttttcactctattgattgctctaattgctgtgtaaaagttttttagtttgatatagtttcacatgtctatttttatttttgtatctgtgttttggtgtcatatcatgaattcattaccaagaccaatgtcatgaaactttttccccatgttttcttctgggagttttaggtctctattttttaatttatttatttttcattatactttaagttttagggtacatgtgcacaaagtccaggtttgttacatatgtatacatgtgccatgttggtgtgctgcacccattaactcatcatgtacattaggtatatctcctaatgctatccctcccccctccccccaccccacagcaggccctggtgtgtgatgttccccacccagtgtccaagtgttctcattgttcaattcccacctatgagtgagaacatgcggtgtttggttttttgtccttgcgatagtttgctgagaatgatggtcttacatttaaatctttaattcattttaattttatttttgtatatagtgtaatatgagtccaatttcattctctggtatgtggatatccagtttttccaacactgtttattgacaagactgcccttccccattgtatagcttggcacccttgtcaacagatgatcggttgaccataaatgagaggatttatttctgggctttctattttgttccattgctctacatacctgtccttaggccagtaccatgttggtttcccccgtagctttattaaggtataattaataaattatatatattttgatgttttaatatatatctacacactgtgaaagaattaccacaatcaagctaattgatatggccatcacttcacatagttacctttgttcttttgtggtaggaacatttaagacctactcttttagcaaatttcaactatacaatactgtattattaactatagtcactatgttgtacattagatctccagaacttattcatcctgcataactgaaacttagtaccctttgaccaacatctcttcatttttcctacctgtcccatccccaaccactctatgacttctacagtctgcatttatgagttcaacttttctagattctacaaataagtgaggtcatgaggtatttgtctttctgtgcatggattatttcacttaacataatatcctacaagctcatccatgttgtcacaaatgacagcaggattttcttttttcaaagttgaataatattccattgtatagtgtatataaagtgatatcactgtgtgtatacacagacacacatacgcacacacatagatcatccctgacttacaatggttccacttaatgatttttcaactttatgatggtatgaaaataagttgtattcagttctctccttaacttataatggggttacatctgggtaaatctctcataagttgaaaatactataagttaaaaatacactgtcaacttatggtattttcactgtaacatgggcttactgggacataatcccatcataagttgaggaatgtgttaggccattcttgtgttgctataaaggaatacttgagactgggtaatttatagagaaaagaggcttaactgactcctggttctgcaggctgtacaggaagcatggcactggcatctgcctggcttctggggagggctcgaggagcttttactcatggcagcaggtgaagcaggaacaggcatgtcacatggcaggagctggagcaagagagagaagtgggtaaacagccagatcttataagaactcgctagcatgaggacagcaccaagccgtcagagatttgcccccgtggcccaaacacctctcaccaggccccatcttcaacatttggggattacatttcaacatgagatttggatgggataaatatccaaaccatatcaaggaacgtctctctcatactcttgcctttctctttctctgtttctctctctctctctctttcactctctctctctctttctctctcatcgtatatatagaaaaattatgtcatctgcaaacagagacaactttccttttctatttgggtgctttttatttctttctcttgtcaaattgctctgactagatttctagtatatgttgaattgaagcagcaaaagtgggcatccttgccttgtttctgaacttagaggaaaagctttcagtttttgtttgtttgtttgtttgtttttacttttgagtgtaatgttagctgtgggcttttcatgcatggcctttataatgttgagctaatttccttctatacctagttggttgagagtttttatcatgaaaggatattaaattttgtcaaacactttctgcatgtactgagacaatcatgtgatttttattcttcattctgctaatgtggtatcacattaattgattttcatatggtgaactacattgcatccaagtgattgatcctatttggtcatggtgcctgattcttttaatatgctgttgaattcattttgctagtattttgttgacatttttgcatttatgtttatcagggatattggcctgtagttttctagtaaagtctttgtctgtctttggtatgaaggcaatacttttcttaaaaatttagttcggaagtgttcccttctctttaatttttgacagactttgagaaggattggtgttaatgcttgtttaaatgtttggtgaagccatctgatattgggcttttcttttttgagaggcttttaattacagattcaaccttcatactaaagtcataatgctcagattttatatatcttcataatttagtcttggtagcttgtatgcttctctaatttattcatttcttctagattatccaatttgttggtgtacaattatttgtagtagtttttttatactcctttgtatttctgtggcatcagttttaagtcttttctttcattttttgattttatgtatttgagtgtttccccttttttcttagttaatatagctaagagtttatcaattttgtttatctttaaaaagaacaaatttgaccaggcgcagtggctcatgcctgtaatcccagcacttcgggaggctgaggcaggaggatcacctagccaatatggtgaaaccctgtctctaataaaaatacaaaaaaaaaaacaaaaaaaaaacccaccaaaaattagctgggcgtagtggcgggtgcctgtaattccagctacttgggaggctgaggcaggagaatcacttgaacccaggaggtggaggttgccttgagccaagatcacgccattgcactccagcctgggcggcagagcgagactccatctcaaaaacaaagaaacaagcaaacaaaacaaattttactctgtttatttttttctgtattttctatttcatttatttcttctctaatctttatttccttctttctgtgaactttgggcttagcttgttttccttttccagtaccttgatgtgtaaagttagatcgtttatttgagatctttctttgtttttagtgtaaacatttattgctatgaacttccctgttagtgttgctttttctgcatctcataagttttgataggttgtatttttattttcatttgtcttgaggtattttccaatttcttttctgatttctattttgaccactgattgctcaagaatgtgttgtttaatttcctcatattcgtaaattttctaattttcagtttgctgttgatttctagttttatttcactgtggtaagaaaagacacttgatatgattcaggttcaaccttcttatatttgtgaagagttattttgtctctaggatgatccatcctggagaaagatctatgtgcagttgagaagaatgtgtattctgctgctattaggtagaatgtgcagtgtagttatgtaaaatctgtttggtctgtattgttattcaagtcttctttcgccttattaatcttctatccagatgttctgttcattattgaaagtggggtattgaagtctcctactgttattgtgttgttgtctacttcttccttcagttctgtcagtgtttgctttgcatattttggtgctgtgatgttgggttcatatataattgttatatcttctttgtgtattcaccctttgtcattgtgaaatattcttctttgtctcttgtggcagttttgacttaacatttattttgtctgatgtaagtataaccactctgttctatttggttaccatttgcatggaattttttttccccattcctccaatttcaggccacatatgtccttgaatctaaagtgagattttggtagagaccatatagttgggtcttgttttttatccactcaaccactctatatcttttggttggaatgcttattccatttacatttatagtagttattcactggaaaggcattactattggcatttagttagttgatttctgttcatgttttagatcttttttgtttgtttttactctcttgctgtcttcctttgtgttttagtgattttttttgtattaatatgctttgattcctttctcttttttgtaacttctataggttttgtagttaccttggagcttatatatcttatagtaataacaatctattttaagctgataacaagttaaattacatatataaatgctacactttaactcttccccccacactttatgttattgttgtcacaatttacatctatttatattgtatatattttaatatatttttatagttattttaagtatttttgtcttttaacttttatactagaattaaaatgcattgacctatcaccattacagtaatatagtattctgtatctatctgtatatttacctttaccaagttttatactttcttgtgctttcatgttgctgtttagtggccttttgtttgaacttgaggaacttcctttaacatttcttgtaatgcagatcaagtggtggtatacacccccagcttttgtttgcctgggaaagtctttatctctctttatttctgaagaagagttttgccaggtatagtattcttggttggcagttcttttctttcagtgctttgagtatgtcattcctctcccttcttggctgcaaggttcctgctgaaaaaatatactaatagtcttataagggttcttttgtatgtgactagttacttttctcttgatgctttcaaaatattttctttgtctttgacttttgataattttgataatttgattataatgtgtctacatttgaatgtcttgagttcatcttatttgctgttcttgggttttttttagatctggatttctatttccatccccagacttggaagtttctagccattttttcttcaaataatgtttctggacctttctctctcttttccttctgatattctcataatgcaaatattggcatgcttggcggtgtcacataattcccttaaattttcttccctctttgtcccaatctatttggccttccataataaaaatgccatagattgtgttttttaaacaacagacatttatttctcacagttatggaggctaagaaatccaagataaaagcactaggaagtttgatgtttggctgggacctgcttcttggttcataggtggccttcttcttgtcatgtcttcatgtggtagaaggagcacaaaagagatcctggtatcccttttataagggtattaatctcattcatgaggactttaccctcatgacctaattaccttccaaaatcccaactcctaatactatcacattgcagagtagaatttcaagttataaattttggaacattcagtccattgcactctttttcattaatttttctttttgctcctctcactaaattatttccagagacttggctttaattttgttgattcttccttcttcatgatttagtttgctattgagcttctctagggaatttttcagttcagttattgtgttccttagctctatgatttctgtttggtactttttaatatttcctatctctttgttgaaattttcactttgttcatgcatggttctcttgatatcagggagcatttttatgagagttatttttaagtttgttacagaaatcatataactgtttcatttgagttggtttctgaagatttattttgtttccttgtttggaacatctttgcctgattctttatttttcttgactctctggcttgatgcctgcccattagataaggcaggtgcttctcccaatctttatggactgggcttgtacaggaaaagaccaccatcaatcatcctggtcagagattctcatggcctctactagtgctttccctgcccagagagaagtagacagctgtgggttttgttcactcactctgtgctgagctggatgcagggagtgatggtgtctaccagccctatctgccatcttcagtatcctctgggcagctacactgtgctgaatccatcagagctttaaggttggagagacaaatggtagttctttaacaagccccagagaaactggagcactggactcatggattaatactttcccttaccaggagaaagctgagagctgagattttaatctgctcactcagtgctgagttgatggggagatcaatggtatccatcagcccaagctgccatcttcattccctcccaggccacaagactatgtcagacttgtcagaactctaagactggcaacatagtagttggtcatctagggagtcccctggaaaagttggagcatcacaggaaaagcaaaccaaccttttttctcccctaggtaaactggggagccaggggaacccttcttgattatatggcactgcaatgggtgcaggatctccagcaagaggatgttccaaatctacctactggcattgctgagtctagttttgcattcttccagggtacagagcctttcaattagtttctaatttctgaaaaatggaatttgtgaattgttgctgaatcggcatgcttatggggaatagaagagtcaagggtcctgctccactatcttgttgatgtcactcttgaaaggattactttcatggcattaagaagactggagacaaaggagaacattgctagaggaagaagggtaatgagataagtcagttattagctattgcaccagttccgagatagataataatgtatggacaagggtcccagaagcatacaagagaagtagacagattatgtatttgggaggtaaaatcaacagggctattgattaattggatctaaagtctgagggtaagggagggatcaataattatgtcagtattttaaagtaataataaaacagttgttgtaactcataacatcagtcgtgattcttgataataatttttacctatgccctatgcacgtaggtcatatgcagctataatatatagctatctgtgtttccaaatcagtttgatttggctctaacatcaaagttgtttcattgcttaaataactctgccttgattagtatcactaatagctatgtgtaaataaaagtgttttaaattttgattaggacagttaaactttgctaattcagactgattgtataattgacttaaaaggtttgagttatgtaacaatttcaataaaataagttttattactttgaagttcatagagcatatcagactagattaagaaatactgtcaagtagaaaccccataggatttactttaatggttgattaaatggttttaattaacgtggcaagtgtttgtaatttctgtttctaaaatggttaaaatttttattatctcgtagattaaacacatccgtatcagttttatttacattatttccttggtaagacccttttaaaactagataaaacaaatgttatctcacgttcaagttacttctatttgttattaatggagtaccaatagcaaagctttacatttttataacatctcagtcaatatttaaatgtgttcaaggtatgcaacatgaaataaatttacttatgaactgaagcatgaacagactgcaaagcatctgtaatcttgcttattgctctgtgttattatcctgagtaagcatttgtgatttaacatccatccatgacactctggcaatcttacttgttatctcgcaagcaggcccttcacagtttttgacagacatctagataaactatgaaacaatatttgtgaatctgaccttaggaaaatgaagctacttctcttcttcaatgatggaactctgcagcctttgtgttctcccatctgaaacaaaatatctatggacctaggatttcaaaaccaagggtgtattcagggttgacttgggggtggccagtcccacaaagcttttctctttttcaccagaaaagactcttaacttcctctcaggctaaagcaggtttagatttgaaggtcataaaggcttagctgatagtttattattattatttctacctttatacagcttctattctggtaaaggagatagatgccaaataataaacataatatacaagtaaagtatatataatagtttaataaattttatagagaaaagcaatgaagaaagatactcctttgtagggagtggggagtgggatattccatttttatttccaaattaaaataagtaattagattttcaatgttattttgtcatattaaaaattgcaatcaactgcacagctacaatcataactactgttcctgagtgtctacagtatggcagatgtgggctagatattatatttatttatcatactaatacaaatatagcacacttactatgctacaaataatatgttaagcactttatgcaatgttacctcgcctatcttaccacacagaaagtgaaatagaatatccctatttttcagaggaaaaagttaagactctgtgaggttaggaaagttgtccaaggtgacacagtccttagggacaaaataggaaatcataattgaagtcagtctggctttgaagctcacagctgtttcctagaacctgtatcaccgtcaaaagtgtgattctatcctttgtttctcctgcctcaacaccaggagctatttgtctttttctgaacgtattttattaatgctatcatttattcttttttttttttttttttttttgagacagagtttcactcttgtagcccaggctggagtgcaatggcacaatcttggctcactgcaacctctgcctcctgggttcaagcgattctcctgcctcagcctcctgagtagttgggattacaggcgcccgccatgacatccggctaattttttgtatttttttagtagagacgggatttcaccatgttggccaggttggtcttgaactcctgacctcaggtgatccacccacctcggcctcccaaagtgctgggattacaggtgtgagccactgcgcccagcctcatttattatttcattcaacaaaaatgcattgtgctgagttgattttcaaagatggagaagttataggcccttccatgaaggatcctgtggtctgatggggaaatagacatacaaaaatttacttttgtaaaatccaattcattttataatagaggtatgaatgccatggcaaagctctgaagcccttctgatgtaatctctgaatttagagaagtcaaatgcctcaagctttttgtggttgttaccttcactcagaaatgcattttagatcatgaccaatatgcatgcacacacacatacaagtgcagcaaaattgttattaaaaacgcttatgcctagtacagacattgtattctgatattttcaagtttttattcttctcttgaaagaaaacctgcctcggcctcccaaagtgctgggattacaggtgtgagccaccaaatctgttcacataccaatctgtctctcttccaaggcctgtggatacatacagtgccattctgcaaattaacaaatgatgtcccctctggacagacgaattacaaaatgacatcccttcctcccacctgttgaagtccagccccagggcatgcaactcagtcagcataactcctgactgaagtttacccccatttgcccctctggtatctgggtgaagtgtacaaattgcacagctgactgcatatagcagcccttcccttttttccctcccttgctgcctctccccttcatttctctctttatcctctccctttccctcccctcccattttttctcctctccttttttcccttttctttaattctgttatactggatgataataaaataaaataattgaggagtttaggaaacaagatttttatattcctttttggaattgtagtaaaatatacaaaacataaaatttaccattttaacaatttttaagtatacaacttgtggcatgaagtacattcacattgttgtgcaatcaccactaccatccatctgcagagctttttcatctttcctaaatgaaactctgttcctataaaacactaccccttcattccctcctccaagtccccagaagccaccattctactttccgtctttatgaatttgactgctctaggtacctcgtataagtggactcataccatagttgtccttttgtgagtagcttattttacttagaataatatctccgaggttcatgcatgttgtagggtgtgtcagaatttccttactttttaatgctaatattcccttctatgtatataccaaattttgcttatccattcatccattggtggacttttgggttgcttctaccttttagctattgtgaatagtgctgttatgaacactggtgtacagatatttgtttgaatccctgctttcagttcttttgggcatatacacagaagtgcaattgctgaatcatatggtactttcatgttcttgacctttgctttttatgaattgaagtttcttgaaaagtctagctttgatacgttttccttcaacaaagacataatacacatgtaattcctgtactgagtaatccaaattgagttcactcttctccacctttaactttgccctgttgcattcctgactgttaatgataccttggaagattccataacttcccagacacttagttactaaagactagtacagtctaattaaaacactctaggctctcctcctctccactgtttccctgaaccctggatcaggtttgactgaggaacaaggaggggtgggaggatagggtctgctctcccatcaacctcccttcctgcccccaggttctagctcccctgtgggtaggaagaaaggaagggacaagtgcttacttattacccccttttaaaagaattcacatagagagtccctttgttagatgcaacctagtctctctatttagacactcctgcaattgattagatcactacttggaccttgttactgagatttcttatgatttgtccgttttgtctgttgctcctaattgattggactgaagctgttggttttgcacacagcctgtataagttgatttttacatttatcttttcagaaggctaactcttggtttcattgatttctctaacctggacatattggcatatacatatctttccaagttcattcctgagtcatttttctgaattctccattgtcaaaatgcctttggtaacccatatgctgatagcttcttaggtcaggaaattttgtgaatccaatatatttggattttccttctttaaattttagaatttaagcttacttcccagttctggaagtacagctcatttccagatcttagtgctgagcaccagagtgaattttggcatagattctgactttatgctacactgtatgctacacatacagtgctatcaaatagaggtaggccaggttacagggaaaccaaacagcatacagtgctatgaaatggtgcacctactgcaactccttcttcatgaactgttataagagtaagagtttaaacaattatttaggccaggtgcggtggctcacacctataattccagcactttgggaggctgaggtgggtggatcatctgagctcaggagttcgagaccagcctgaccaacatggagaaaccccgtctctactaaaaatacaaaattagccgggcgtagtgctgcatgcctataatcccagctacttgggaggctgaggcaggagaatcacttgaacccaggaggcggaggtttcagtgagccaagatcgcgccattgcactccagcctgggcaacaagagcgaaactctgtcttaaataataataataataatttaaaatgttttatggaaattaaaaattataacaagaaaattaaaaccatttgaaagtactttatccaaaaagaaatactattgccattttaaacacatacataggtattatatatatatttgagataccgtaatatatggtttcatgtcctgattttttaacctagtatgaatatttctctatgtcattaagaattatttgaaggcatgatctttaatggacatattaaattgtgttgtatttatcatgattcagttaataattatctaggtttagagcatttataataatagcaatatccaataattattcagtacttactatgtgctagtcagtgctttaatgccttacatatatttcctcttcatttaattctcataacacttttgagatccccattttgcaggcaagaaaactgaggtatagagaggttaacaaccaaagtctcaccttgcgattggaagttggtcaagttgtaattgttactctagctagtctggctctctaatttgtaatctaaccactggctctctactttgtaatcttaaccactatcctacctgactcactgtatgataagtatcttcttggggaaaaaaaatctttatctgcatttctgatagtttctactgggagggttcctagaggtgaaataactaggtcgagagctaggaaaacttttaaacttaaaggcatgttgtccagttgccctccagaatgttcccaccagtccatgttcacaccaatagtgggaagagcctgcctgtgcactcccaccgctgttgtttaattcctctttaataaccctgaatttgggatcttcctgaatggttaagagaatccaaggatccagggctcccttaagaacatagaaagtccaattttatacaaatgtggagtcatttgtatatatacctcagataatactacatctttgttttattggtccatacataaacgaacttccttatcttatcatcagtagatgtgagaaattgctaacatgagtgtgtacgacgactgattgtgtcaagtctgaaggtcattacacctgtcgaggctgcctttcaaaatgtagccctattttgacaactgctgtcatgggtggtatttatggtattttctcaagcttttaggcagttggaagtaattttacattaatgatcttatattactctttggtttaaaaaatggcattgtaaaaatgcatcctgctcacatattttttcccttgattagcgttatagaatgtacataaaatgttacactgcatctgcatttccaggtaatagtaacttttagtaaccctggtttttatcgttcgaagataatttctttactactcccagtgaaaaactgatattatcaggcagaaatcccctagactttttaatagaaaagttgaaaaaaattccaaggaaatatcacagggaaaaaggattttggtaatttctacagtgatttggacaagttcaatgaggaattgaaaatattccttgtgactgtgtgaaaattaatcactcacccttcactggcactttggattagtatttcgtcctcactattttctgaaagaatcttgattgaatcagaggtttcactgtgcttcattaaggttctgtgtctgtgcaggtaccgcttggactttgaattgctttagattctaagtatataaatcaggcaagaagctggtaacctggagcaaataacaaatgcacacttactgtgaactatctggaagcctgtgttggttgtgattccttttctttttatttttaagcgtgactgttggtagaagctttgtcttgaacacaatgctgttgttaatagcgaatgaaatgactggaactgtgctgggggaaaaaaagtaggctgaaggtttatagcagaccactgcaaaccaaatgttgcaattatctgcagctgaaaacaagtagcttttaatgtgtccatttggccaagaagagggaggagaattacagactattgctctttcctctctcattctcatactctgtcttcttctttatgtagtttatcatccacaatttcaggatgtattttccttctttaagctgttttatctgtaggcttatgaggtcactcatgtgtgaattcctttgttagtcatctcaccttttgccttgatgatagaaaattgatcaggcctaaagtacaagttcaatagacatcccccttggtcctttgtctaggagaatagctaccattgaaggccatgagcaggttgctattaatatgacagcctgctctatctcccactgtaatttataatgaaatacctaatctccattattttgatccaagcaggcgatcccatgaaaaagtcttttcatccagttcccaatggctgttacatgagaaatggcaaaccaataatttttgtcaagttttttaagccaacagaaatgcttttccactgctacagtttcaaaaggcacagataaagctcattcactgagatgaatgaaaaagccatctggggtttttctttttgacttcctttccttttctccatcctagtaatcaaatttgagcaaaatcaaatggggctttctatgaaagtaccttttgttgatctgaacgagctggtaatttacaaaatacccttcctttgtgaggaaggctaaagaaaaaaagaatcagtagcttttaaagctgggccttagtgggactctaaatgcaatgaaagcagtctgtgttgagagactgaaatgcatttcaaagccaggcctgattcggggtacaaggaagaacagacctatgtgcattttgtaggaagaaaactgtgaatggaaaaaggagaaggggagagaaacgggggaaatctggataatacattaaagtaaccataattttggagatgcattcatcttattgaaaatatgtacgtaaccagtgataccgaagtcggatatttgctcaatcaggatgctcaacaatttgagcctttaaagtttggagctgcatgggtttgtggagaaagtcggctcgtgatgtgtgtgatgtttttctccaactttttctttttcttctatgctttgggatcttgtgggaagtacctcaagaaaacctgaagatgctaatttttagacaactaatacttcctattttccctccttttgcctgctagatttcctcatggttgtgattcctcttcactcttttgaatttggaaggatggcatacacatctgaaaaatagtaagtaatgtgtgatttatttttcaattactgttactaattgtaataaagctgaaatttgattactggaggagtttgaaatcatcatgcatgccttgaaggaaaatgggttttgtgaaacatttgcattatttggtgtgaattacctttggtgtgatttaactgtttatcacacaattactgttgtgataatgaatgtgttattcactattgctaaatttacccagtatattctgtaataactaagtatttgtgccatataatatatgcattcttagtgcaacagtttaagaaacaatgcaaaaattgcagggaactgtctttggagatgctaagttttcttgttttatataccacacaatcttcctcacacatttatagttttaattcatagtaataatgttttctagagacctttctatttatgcctgaaatgaaattctcatataaattatgtgagcttatttcttcaaaatgaatatccagagagaggcaagaattattctgacattattaaactgcatttttaatgcagtttaagtgacatttcttataatttaatcaagcattataattaaaataacaaagctttgattagagactttttttttcatttgggaaagtgaaaagttcatttttaccttcctaaaaataagacagacatatgctatctgaagacatgataccttggattagagtacatgccacaagtattttttaaaacatagatgcagcattggcatttctgagtaactacagtgcatattttaaatatataaatgccttagaatgaagcaatatggggcagaattagttctgaaatctctgaggtagcttgaacagtatttgcattagggctggcactgctaaagcaagcagatcctgggaatttcatgtaggcaaacatgagatccttgtttctggagacaagaaaaaaaaagattaattaaaaccaagtcctatgttgtttaacccttaaaataacagtcagtatttatagggatgctgaaatggggaaaaggattcagattatttcacagaggtctctgcgagggccaaaccctttcccttctaactattcctcacatcgaatataaattcctggaagtttgtatttaagatgacgtctgttttctgagcttttgcagctgcaggtctcttttccaacttcctacatttatctttgcctgtgtttttgagccatttgctgcctcctaatgcctaactttaaaatagcatgcatggcagcctgccaagacggtggcagtggcatattggtttgtattggtgttgaagttgcaaagtttttgttaccgataatttataacaattgcaacaaaagagattatcaaaacccgaggggataggagacaggaaggagaacaaaactgctgcacttcttgatggatcaaagtgtgattcttcctgcaatagcgagttgggttgttgtgttgtctacatgggtatgatgctctagatgacctgcacattgtcactgtagtgattgcctgtaatgttagattgacagaaaagtgcaatataaaagagggtttgtctaggggatgtaattaattatacatatgatgcaaaatttttttctcaggctattgacttcttttatataaattaagattgttgttaaattaaggtttttttttttttttttttagttcttgaaagaaaaagtttattatttaagagtgtcgttgttgttttgttgttaatacaaattagtacctgggaaataatgctttgtcttttgctggctagtttcatatctactcaatcttgtaagccttttgcaaaagttctcttctataattcctttaagcacttttggtaaaagctgggggtacttcgttttgtcgcagttgtaaaggatctctgtgaagacagcgttaagaaacaggtaattaggccctgaaatcagctaaggttcctgcttactccacttatcaagattagcggttctgaaactcttgttagtatagcaatctactaacaagaataatgttgtacctatgctgagaggaagagaaatcctcttgctctcagcataagtacaaacattaagcaactgcattttggggagctggagaggtaattattttcaattagcctttgggacaaaggaaaccgtctcacacattttgcttgtggacttcatattctcaagtataacaactgatatgttacacacttcactctttgctaagccaatacaaaaataaaaacaaaccaacaaaaaatcactcctggaaagtttagaaatatagatccacaaaggtgatccacagagacaccacaaagtatctttaaaacttctcagaggaaaggaaatgagtgacacatttgtaaagactgaagcatctgagattgactttaaagttctatttttcttctagtaaaattaaaactttattgagcttctcgtcagaaacttggagctgcttttccattacagtgatgctattgaggtttcaatgctttcagggcctactaatagaacccaaaagtggagagaaggctcatgaagcaccgctcttctctggatggaggtcctggtccctgcttaagctctgccagtagaagctattacctaaaggtgttcttttattatcttaggcaggacatgcccctgctttgacatatcagcaggcagtaacagattgcttgactaatcagtctgcattctctagggttcaggatgcaggaaagtagttggcctggtgttcactccaactttacattgatgcctctggactcattaccggcatctttgcactttgctttcctcaggtgtcaaaagagaatgttatgtgtcctttgcttgtttcttgtcttgccttctacaggctgggcagacatactgggatgtactttttggcatgaatatgatggtcggtctagttagcttagctggtgatgacataatggcaaagaagaccaacagacactgatgtcactcctaaccccagatgggagccaactttagatgacaaaggggatgaagcaggtattgatcaatgcccaaaccattccaattattagtcagacaactctcagcatggcagcagcagcatccaaaagggagaaaaatgtgccaactcccatcatgtcttcaaatgcagaatggggaaactgggagcatagtaaacagaaaaaaatctattttgtagcaccaccttttacaagcattttgatgcatgctgtaatacaatacagtagatataaataatgtccagataattaagaatagagaaaatataaattggtttgagacttaggagggaaaagaacaacatacatatgaaggccatatatttttaacgtttttttgagtcatagacttggctcaaggtttttaacagctaaaacaaaagtggaaaaaagtcatctagaggataacttccatatagtgagcattttatacagcccgaatggttacaacaacctcaaagccacttattgttaccgttgttttctggtggaaaaaatgcagaatcagaaggattcagttaccagccgctggttacgcaggcaacacatgcctctgtgggattaaatccaggtctctctgactctcatagccttgactgcctttgggtaacatagaagtcagctgtccctgcagtctcctccacgtgcataccctctttccgtgactgcccaaggccaatccagaatcacggatgtcagctctacactgaagttctctaatggaatccactttcatagagagtgagtgggcaatgtggactttactgagtgggaagttgaggggatgaactttgcatatcccacatcaagccacttaaacattcctgttaaacattctggtctgtaaagtacctttttcgtttgctaaaattggaggttcctctctttgatccttctttcatgctccacccagcttccctagctgctttcttctattcctgtgtccccctttctctcctcattaaaacataatagggagccatatggttttgccccagcttctaaaaactaagcttgcatgtctaaacccagtgccatgcttagcacacctccaaaacccttctctgtgacagttcttactctacttagtagaaatgaggatgacgtagcaattgaaataatcccattgcacgttttacttcagggaaaaacataccagtctcttggcttttgaggcatttagttttggaaaaatattcttcagtgggacgttaaggaggattcaggggacagtgtctccatcaacaggcattacagaaaatttcattactcttttgcttgtagctaccccctgatgactgagtccaaggtgccacaggaaaaaaaaaaaaaacttagaacatgttagtgtatatggggccacaaccacataattaaaggatagctttaaatagaaaattaaggatggagggagggatgaagctaagaatgagaaaagaaataaagggaacttacctagtaatagaacacgagaaatgaatttgagtctccctttcagtgtgtcccacaatttcattgtatactgtatagaaaactatatcctatatttacatattaaatagacaatgtcaagtttatttaaacgataatagaatgctgatgcctagaaagggaaaggcaggccagagactctgaagaatggaaaccaagccttcttcaggcttaatatcacccaggtttagattgtgataatacacattaaatcatgtgattaggtagtagggcttttatcagttcggtttctatgtactcttttaaaaattttgaaaagagaagaatcaactgtaatagctcaacatatacaatttgttttgagtttggggcatggagtgaaaattgagaaacattttataaaaccttttgaaaccccaggcttagaaagctttcagagtcatttgtctgcactcaggtggattttctgcataggtttccttttaagttactcaggtctttacttctgcttttttggcttaaacagttgatattatatggttgttggagccttgaacttgattgtcagccagtgtagctcttttaggagaggatgtcaaatctgccagccatccaaaattgcctacattgtcattgctctaatgagtatgtccttcaagagtcaatggaaggctaaaaataaatgccttttgatgtttacagactccttataaagtgctctgaaaccaatatgaaagattataattttttctctctcactaagacagttacaagaacagatttaataatatgtattttcttttgtcaggagaacaagctctcttaacaaatatatgctagatcattaggggtgaaaagacatgggcacagtgacaaaagtgtactatgaaaaaaaaatagctatttccaatttcatttgtaaactgaagggcaaagtacttcatccagtggaatcatttagtatcttaatagttcaaaggtagaagccagcaggacacagtgaaataaacatgtgagcacaagaaaaattgtgcttctccagccttgctgtgcagaaagtttgaaatttgggtacaggtcgtgcaggaatttcaggatttctctcatctgctgggtaagtcagctctggaaatatggctccttaagcacacagtagagccctttcctgtcaagcttacttggatgactcctctgaaacaacttggttttaaaaaaaaatggggctactaggcatggccaaagagaaagtcacttgtatttcctcaaagaaaattcaaaactagacaagctacttttctggcctcaaaaaaaaaaaaaaaaaaaaaaaggccgtgtgcagtggctcatgcctgtaatcccagtactttgggaggccaaggcgggtggatcacaaggtcaggagattgagaccatcctggctaacacggtgaaaccgtttctattaaaaaaaaaaaccaaataattagctgggtgtggtggtgggcgcctgtagtcccagctacctgggaggctgaggcaggagaatgacgtgaatccgggaggcagagcttgcagtgagccgagatcatgctgctgcactccagcctgggcaacacagcgagactccgtctcaaaaaaaaaaaaaaaaaaaaaaaaaaaaaagtccagctgcctacaaggacagcataatccatcatcaatgcagtgaaaatagaaaaacaaatttaaaaagaaattttcccctttctatccttcattcctctaccctcccttctaaaattaaaaatatatttcttctattttttttttattttttattttggaaaggaaagtaaagaggaatgaaggatagaaaggggaaaattccaggcataagatacattttagaacaattcacttgtgttttgaatcctttctctaatttgctcaaagtgtttattaatggccactttatacctagagagtcaaaaaggtttaaaggctttacaacataaagtcacacaattttagagcttctttttgcctctagcagtgggattgccagctgggagggcgagcagtacaaggaaagggtgacccttctggagagcgtgtcaggatctccaggtttctgtttgtggtttcagaaagtctgtgagcctatctactataatactataatgtcatatttgaaaaatgcaaaagtaccattgttttgggtgcggaattggtgggttcttggtctcactgacttcaagaatgaagccgcggacgctcgcagtgagtgttacagttcttaaaggcggcgtgtccggagtttgttccttctgatgttcagatgtgtttggagtttcttccttctggtgggttcatggtctcgctggctcaggagtgaagctgcagaccttcgcgtgagtgttacagctcttaaggcagcacgtctggagttgttcattcctcccagtgggttcgtagtctcactggcttcaggagtgaagctgtggacctttgcggtgagtgttacagctcataaaggcagtgtggacccaaagagtgagcagcagcaagatttattgcgaagagcaaaagcacaaggcttccacactgtggaaggcgacccaagcaggttgcagctgctggtttgggcagcctgcttttattcccttatctggcaccacccacatcctgctgattggtccattttacagagagccgattggtctgttttacagagagctgattggtccattttgacagggtgttgattggtgtgtttacaatccctgagctagacacaaaagttctccacgtccggactacattagctagatagagagtgtccatgggtgtatttacaaacactgagctagacacagagtgctgattggtgtatttacaatcccttagctagacttaaagattctcccagtccccaccagactcaggagcccagctggattcacccagtggatccctcacaggggctgcaggtggagctgcaggtggagctgcctgccagtcccacactttgcgtctgcactcctcagcccttgggcggttgatgggactgggcgcagtggagcagggagcggcacttgtaggggaggctctggctgcacagcagcccacgtcagtggggggaggctcaggcatggcaggccacaggtcccgagccatgccacgcggggaggcagctaaggccgggggagaaattgagcacagcagctgctggcccaggtgctaagcccctccctgcccggggcttgtgagccagccagctgcttggagtggggggaccgcagagctcacgcccacccggaactcacgctggcccgcaagcgccgcgcgcagccccggttcctgcccgcgcctctccctccacacctcccagcaagctgagggagccggctccggccttggccagcccagaaaggggctcccacagtgcagcagcaggctgaaggcttcctcaaacgctgccagagtgggtgccaaggccaaggaggcgcggagagcgagtgagggctgccagcaccctgtcacctctcagtttcaatgatttgaacatcacaaactaacgttccacagaattgtcttggtcagatcctaatgggaatatgcagagggtaagtcattctcagcctgcaatagcttctggataaagtgtgggcagctctttcagaatgtagttggtgctgggggaagcataagactttacatgtttattaaaaatagggtataggttaaaatagggtaagaaaaactggtttagatcagaatgaataacagacttggggagtgttctttattcagtaagtatttgtagagcactctattgagtatgacactcagatgaggatgtcttacatttacatgtaaagaactggacatgtaaatgtgagctcagatgaatcctgggctcaaggcagatttagaaccatctttcaacagaaatgtcaagcaagtcaaggaccaataaaggccctttgttgtgtttagcaacaaagagattgtgattgatttcagcgaaagcagtttgggtagaggaacaacatgcaagccagtttgaagtgggttaagaagagagtgggaggtcagacaggggagattgcacccatggacaaccctttcaggcagatatgctaggaaggggaagaaagggaaagggtcaaagctgaagtagaacacaggaatcaagggagagtttttaagatgggagataattgaaagcaaagtatttctatacatatgacacagcgaagtaactattgtttagtgttctttcatgaggtggtcagtcaggtgtggccactagagagcacaaaggggaggtgaaggaaaacgaagtttattgtattcagatgtcctagagagacagggtcacgtggtgggaggatggagggacggagggaggagcaccaagggagccagctcaaccaagcaagcaaggatcagagagaccaagagaacaagtgccttgatcaggggtcagtacggggtacacaagcaaaaggcaggaggggatttcattggtgcatttgaatgtcactaggtcaaaatcagaggatggcaacaaccagaacttggggcagtggccagccttatcacactggtgtacctggctacctgggcagggtgctcatagaccatttgttggcattgaggcagcaggaaatacgatgttttaaaatttacaaaacaactattaattcactgagtgtttattgaaaacacactacgaggtgaaatacgagataagaaatgcatagttcttgctctcatggagtttgcaaactaggtcactcaataaggtcaatcactaatataataggcttgagataatatggctcatccaagtagtatgaacagtgctatatggattaaagtgttgaaggttatttattcatgttggattaggaaagatatttctgagaaagtggaccttaaagaatgaaatattccaacagtaggaggtgggaaatcaaagcacaaaggatgtggaaggccatagggtatgatgttggatgttgggttattataccatagtctcaaaagatattttttttggaagggagagtagaggaaagaggaataaaggacagaaaggggaaaattcaaggcataagataaattttagaacaattcacttgtgttttgaatccttttgctaatttgctcaaagtgtttagttaattcaacagttatgtacttagtgcttactatgcgtaaggcagacgcataatctcaaggagctcccagccaagtgtatgttaagttctataagacaaggaaatacccagtgataagagattacataggagacatacgtgtgtggagggaacagaaaactcaaagagtagcctttccagaagagagagagaaatagtttcaaatattacccatggaatagagtaaaaggatacctgaaatgggtctgtgggcttttgcaacatggaggaaactgcaggagcagtttcattgaagaaattgggagcaaaattataactgttatagactgaatattgattaggaagtgagggattgaggacagggaaagaggagaaatacttttagaggtaaatatatggcagctgctgagggcaaagtaagaaagaataagataaaaaagatcctatgattttaaatctcagtgaataatggcatcacttggcaaaacagggaaatcaggacaaatacttaattttaagggagctttggtttctccttgattaagtttgaaatatggatagacatttagtccatgattgaaaaaaaaggatacaaaaaatttaaagaaatgttaggtctagatacagcttatttagatgtgcataagctaggtagttgcagccagggtcctagaagatagaacagtggaggagagagaagagtataaagcacaggagaaaaggatgagaaagaaggttaaaggtcagaggaactgactgacaagaagtggtcagaaaagcaaaggaaaccatcagagggagttgttatggcagttaaggagagttttgttttaatggttgtgtaatcttcaatggttagactgtttgctctaaagcagaataaagaccaagaaaatgccattgattgtgacagctaataattgttgataatcttgacaagcatttgttcccaaatggggacaggcattgtagtagattgattaaaacaacagacactggattgcaaggagttaaggcgtgaatgggatttcttttttattaccgcagagaaggtgatagaaaaccttaatatgaggttgtcgcaaggttgagagaagacctgagcatatttctatgaataactgtatgtgtagaggaataaagtcattggaggtgacacttgaaaggaaaaggtagaaaaatgatgaagcaaagttggggagacagtatgatttagcttctatctcagtgtttctgtcagaatttaatgaagtcatggatataacatatctgacatataataggttttcagtaagtatgacctattggtattttggagtcagatgaaatgaggaaggcatttatcaagtgcctactctgtgccaaacttgtgctgtttcactttccctccacaacaactctctgagctgggtgttgtcagccacatgttgtacctgataaaaccagaggtgaggccttgctttgggtcacaaccaagtaactgcagagtttggatttgaacgtaagtccctcagagactaaagataccactaggccttacaattttatgaataattttggtttcatacaagagtaaaggaaacaagggaagtaatttgaagaagcttttaccgaacaggttgtgtgttctttgtgaaagagaaggtgagatatttgctgagagtgaggaagtccgggtaggagaggagactgaggagcgtgaagaagacttgaagtagcaaatgtagggagtttgggcatgattaagaaagaaaacaagtggaggtagcatggactttcagtgaaccttgttttataaggatttctcaaaataaagtctctgatactgcaacagggtctttcaagtcagggatcagcaaacttttttctgtaaagtgccagacagtaaatgcaggtattttagactttgtaggccacgtggtctacgttgcaactgctcaacttagctgttgtagcataaaagcagctataaggtaatatgtaaataaatgagtgaggctgtgttccaataaaactttattaatgttaaaaaactactaatgttagaacatttgaatattcatatttcttgaaatgttcttcttttgatttttttccaagaacttaaaatgtaaaaccatttctagctcaaagacagtacaaaaacaggcagtgagccagatttggctgtgtttgttaaattacacattcctgggtttcactctagaaggatccaatcagaataattgagggcagagcccagaaatctgcatttaaaaaagggctcttgcattatttttttaatctactctaagactattgcttaaagacagaactgtaagtgaagagtgattgtacatggttccttgaaaaatgcagagtctctaggtctcaaaatcactgaatttgcaacacttggcagcacaggactagaagccatggaagggccacagtggtctggaacttggcatggaaggaatggcagaagatgcatgggtgaaagattctgtatttgtggctagtgcttcactgaatgaccatccggagggcccagacttggcaggaaggcaaaggaagacagaaggaggctgatgtactaaaaacaaaaccaggaggactacaggaatttgggctcatgatgacagtgaaaaccagacttggaaggtcaagggtcatgggtagaaggacaggcatttgtgattacagcagacattcagaacaggtgtaagctctgttgatgtataaggtagagccatatcaggaatggaccggtgtcatggaggtgggtgttcttggaggtgagaggtggagaactcgtgaggccagtgtctaagtaggattgggtcaacacaaccggattgagtgcctaagatattcaagatgcagatagccatgtgagtaacagaagatacttgtcagcatgggttaggacaagggggccgggagaacggtgtgtaatattttgacaggtagagaacaggaaaggagatagaaaaaagaagagatgttcattagtcatctgctctgtgcttctttagtgggccctgacacatgtaaactcgtttgacctttaaacaaactgaggagagcattattactttttagaagtaaagaatctgaagtctttgcttttgtttttttcctgaacacaaattcacttgaaatttaaaagtaaaaatgtttaaataggccaggcgcggtggctcatgcctctaatcccagcacgctgggaggccgaggcgagcagatcacgaggtcaggagatcgagaccatcctggctaacatggtgaaaccccgtctctactaaaaaaaatacaaaaaaattagctgggcatggtggtggtcacctgtagtcccagctacttgggaggctaagtcaggagaatgacctgaacccaggaggcagagcttgcagtgagccgagatcgcgccactgcactccagcctgggtgacagagatatcatctcaaaaaaaaaaaacaaacaaaaaaaaaacacaaaacaaaaacattttaacctactagtgatatgtgagaaagtaaatattatatatattattgtatatgacacacattatatacatatatatttttacattttatacaaatataaattacattgctaaacagataattggaaatctgtgccatcgaaataggcaaacaaatgtgttaaatatttaatcattcctaatattttcaagtcataacatatggagacaaaataattgatatttgtggttaattatcagaaaacttatatgagaataaagaaagaaatgaaatagactaaatttaacataaaaagagacctcatatacattatcaataatattaatattagactttgaatattgaagtctattctaaaaaatacatgataaccgttactacaaatgactctagtatattatcccaaatttatagatgatgaaactgaggctccgagaggacaaaaacttgtccagcatcacagatctgggatatgaattcagatcaatctgtgaaaagatcatattcttttcactactccatttgtgaagtcccagtactgtgataaaatgtcttttaacttgatttcaacatcttctgaaaatgataaaaggaactggcagattctcaaaagtttattataaaactcagttgggctatgcaggtgttaagaaaaagtccaagacattcctctataactttacattcagatgttaaattgtgcaaaatttctaaaatccttgaaggaagccttaaaactgaaacaggtagaagaaagtcagaaagctgagtagacgtttaaggcagtgaggaagaaagttgcatgtcaacttcatttatgctggatgtatatggtggatttgttggaaaaacgagatgaaattaaacatcatcagggaagcagcacacaggaatattggccacccatatcctatgtttcaggttgttttaagctatcagaaagaagtcttacaaagtcataaattccttattgttttgaaatgactttacccaggataaatgaaactcaacaactgtgtttcaggaaacctaatccttgattatctctggctggaatgtgccttcccatttccctaatgtctcacctctgcccacaacataatgagttccacttttcttgctaaaactctcttgtcttttgactttacccattcctatctttggattgtcattaacacatcctcccattttcatcttgctttgccctttgtggggagatgtatctttatgtactctttgctctcgtaaatcttgtacaacagtacacctcgattctagttttttgttttttatattatccaagaccttttacaacttccttcaactcactcttggaactttagtttttattctttgttttccctggtgcttattaggacattattgtccgcattctccagaatggtctttctgtccttctcctccctgtttttctttattccttcatgccaccttcttttctatctttctcatatttgtgccttcagatccccatttttctctcttttaaaactggaggccgaataagcttcttcctatgatattctttttccatagctttcttctgaaattcttttttatctctgaaccttaattctcttttattcttattaaatatcctccccaaaagtccattaatttttcttcatccttcaactaaaaagcttcccttcaatctattccaaacgcatcagatatttgattcacttcctcacctctgactttattcttgaccttttcccaactactttcttactatcctctacactgaaattgtacttaccaaagttgttctaatgacttcctctggaacaaattggatgttctttcatctgggatcctatctttcctggaaataactctatccatggactggtagatcatctttgagatactattgaagcaagatgggattcttctaaaaaaaagaaaaaaactaacaaaatatcttctaaagtgtgcaccattttgtttattttttatggatgtcagagataacttgctatttacattttcaatggctatctttaaaaacatattatggttttaaacatagtttgagttggtttgaatggtcagtaaatggttttctgaattagggcaggatccttttcccttaaggtcagacttctgagtcagtgttataaccctcaccacacaaacacactgaattcctgttaagttaatttgcaagttgtcaccacagttggccaatctaaataaattactttttgaaaataattttcttagtcatcttcattcttttaaacaaacttccaacctacacaaactcaaattcagtcaaaaattagaattttaaatatttctgaattaaccttgaaagaataaaaatttccttcaaaaattcctattaatgataaaaattacattagcctttatttggttccataaatgtattttgtactcttgtgactgttcttgacaaattttaatcatcattatgaacaattagagtaaaaagttacagtgatggggaaaatgatttagaaagtataaaggttgtggttctgtaacaaaaggcttagaatttcaagttcagttcagtctgccatggtctatttttcctgctaagtgtgaggaggtgtagccttagacttctctgatttcttcgtgcaggtttatgtcactagctattaacattatttaaatatagctttcttaattcctgagaacagtgctgaaaatagtgttttgactaataaaatggagaagacaaagaatccaaagacaaaggcaaggtatgcactgactgatgtatgtcattttaataacataattacttgataagcacttacatgatttagttactgatcttcaacctttcagagctagagaatgagttggtgatgtattacacccagagactgccaaaaatgagcagtaatgctgtattctgtggtattttaggagacatattcctgagttgtatcattaagtagcctatcatataaagccggacagtttagtgaaaacatctcacagcagaaccaggttgcttttttgactcagtgatttcctcagtttctccaggctggacacattttagagcagtaaaaaaaaatattgcactgtctgttcttctgatttatgagtaactgggaataattcagaagtgcagtctattcaacattctaccaggattatgcaactaagaacgttctccagaacatctagtccaggcactgtcactatgttgaacttagactcatctgaaagaggagtgttttttatgcacaggaagagaaaacactgatgatgtttctgaggactaaacatatcagtctatttgcagcaagatgctatggtttgagcaaatgactgagtgtgatcctgtccaacttctcttacacaggagaggtcaggttaagatgaccattgcaagtaatctctatgaggtaaatgtcaacatccatttgtcaattaacttgtatttattgagtacttattggatgcagacactctgtcaggtgcccgggacgaaacagggagcaagaaattgtccttagtctgttagaggctagaggtaattaagattataggtaattcctggttttattgacaattacaatgtagtgttgcagtagttttgagtggaggatgcaataagaacacacaggaaagacattcagcctggtctggaggtggatggggatggttcagaagaggttcttggaagaagtagtgctcaaccagattctgaataatgaacagtgttggccaggtaaagagatggcagagcaggaagaatattctaggaagtgagaacaatgtgcagaattctgaaggtgagaaagtgacccactcagaatatgttgtacagtgagaggagaggagtggggaaaaatgaagatggagagaaaagcaaagtccagatcatgatgtctgtatatcctgctgaggagtgtcgtatttattctaaggatcatagggagcaatgggagtgttatgaacaggagtgacatagacattagtgtttattattaggttgaaagatcaccttagttatataatcacagcgaagtgaagtgggagcagggatggaaatagaaggcagggtttggtcaggaggcttgtacagtcatctagtaaagacataatggtgccttgagatgaggaaaatgggtagatatgggggagatgtaaggggtggaattaatggaatatgatgatcatctattgggaatgagagagatggaacactgagagaacactgagagagaaggactcttgggtctgttccaggccatgtgaaagaaggtggcaccatttagtgagagaggacagggaagagtggtatgtttgtgggtacatcattgagttcaactttgaatgtgttgacttgaaatgaatatgtaaaagaaggtagggcagtcccacttccgttttgttgttgttgttgttgttgtttttgttgttgtttgtgtgttttttgtttttgagagggagtcttgctctgtcgcccaggctggagtgcagtggtgtgatctcagctcactgcaacctctgcctcctgggttcaagtgattctcctgcctcagcctcccaagtagctgggattacaggcacgtgccaccacgcccagctgatttttgtatttttagtagagatggggtttcaccatattggccaggccggtctcaacctcctgaccccaggtgatctgcccgcctcggcatcccaaagtgttgggattataggtgtgacccactgcacctggtctccactcctgttttgggtagttgttaagggatgtttcttataggccaattatagaagtagtatcaagaaatctcctcagcattacttttatattttagaactatttcccaaagaaaagctgactactcataaaaatacagttgaagcttgggcaggggctttgtttcagttctgtccaagttggaaatgaaaaggtgcatgggtgagcaggttcagctggcattggaatttcactgccatgaattgccagtgggccatctgatccatctccttgaaggagcagacaggctaggtactgtggtgcctaggcaggctgagtaattagaaatataatcaaggtaaaaactgaagttaagggatgtgttgaggtggtgacagagagaggtaatctagagaggagaatctgaatgtgttacaaaagggaaggagtaaagcaagtaatatgagctggattaccaagcaagagacttgcagattcagagacctaaagcagagaggaatgggttgggtttgtaagcaagagagctgcccttttcccttgctttctcaggagattgaggctgtctcagagattgaggctgatgctagaggctgtcttttgggcattcttagaggcatggtgcttgctgcagtcatgaagtcagcaatggggcagatacctgtgtttaagtccttaggtcccctttaagcctggaaactcttcaatttcgggggtatttttagtattagaaagttatgtctgactgccgcttctgtgggtgaattacttgcttaggattttgagatagggaaggatgggtagagcgaggacctatcggatgtgtaggcaaagctggtggccaaactctaaagaagagctaagcatgggccttctaggaaacttcagggttgtgggaatccttctgtgagaggttgagagtaaaggtttggtgtgggccttcggtgacagcagaaacttcttgatgtggccctctgtgaagtttcaagaaggtggtctcttgggttgccggccctagtaggggactttattagcatttctcttggagaaaacttggttgggtaaaagcactgaacttctgtgatgggtattagaatgcaaagctttcctttgttcatttatttgactatggaattctgttttttgtgaagcaatttaagggcccagttttctacaaaacacactttccatgtatatgtatgtaacaaacatgcacgttgtacacatgtaccctaaaacttaaagtataaaaaaagtctcatttagctcaaaaaaaaaaaaagaagtgctgtattcaaaaatagagttattactgaagatcttgaatcattggcaatctaaaaatgttttggatgcagaatgtcttaagcaaaatgtgcagtatgaattgcatatgtgatatcactgactgaccaactggaagttggagaggaaagttacccacgtaaccaaataaccacaattgttgaaaatactcttttgagaaatagtattagacgatgtaaatctcagtatgttattgattgtatagatattgttagtgatatctgggggcaaggaggacctttttaaaatttttttaattaaaaaaaaatttttctgagatggaacctttctctgttgcccaggctgtagtgcagtggtgccatcttggctcactgcaacctccacctcccgggttcaagcgattcttctgcctcagcttcccgagtatctgggaatacaggcgcccaccatcatgcctggctaatttttgtatttttagtagagacagggtttcgccatgttgactcggctggtctccagcttctggcctcaggtgatccacccgccttggcctcccaaagtgctaagattacaggcatgagccaccgcacctggccgtaaattctttttctaattctaaatggctttaacatatcttaagcttttaccattatagtcattgtaggttattatcattctagataaaaataccatcataattacccataccaaaacacctgttaatataccatcttaaaatattctctcattttattagcttggttagtagccagaagagacagtactgcacataacttaacaggctccaacagtagtcttttcagattcacctctctgttttgttacctactagctctgtgatcttaggtaagttacttaactcctctgtgcctagttttctcattgtaaaatgaaaacacgatttttggaatgcagttctgaatacttctgtgaagcatgttgatgctttgtaaaaagatagtaccaaaggaaagaaacacttcttcaaaaatggaaaccttgataatttgcaattttttctagtgtttctctcattgccaactgtgtgagctgctttgaagcctttctagcctttatcttatgtgtgctggaaaaaaataaaatctattttgaaattcctattgattcttcagaattctgaattagcattcctgatgttcacttacatgcattctctttatctttgatatcacttcccttttaaagcaatataaatgatgtgatatgagaactgaactgtcccactgcctgggtagggtttgaccatttgggaacaatctaaaatacttagcattcatcagttggaataattaaatgtgcaggaccaggattaagaacccagactgatagttcttccccttgaactcctgtgagctctttaagcttctacttccagaaaggaagattaaggtggagaagtagtgagagatattgaagatatggtatgatattaactagacccccatagctgaaaatgagactgtttgttaatatctaaagatgactggagaagttatggcagctacctgagatatttccaatggaaaagggagatttgacaaagcagagatagaaggccgtgcagggaggaagttaagtgctatttgctcttgccttaaggagccctgctcgtccagtgaactgattgcatccatttatttgtctatatttccagtggaaaatgaacttctgaatggcaggaactatatatcttaatttctccttcagctttgtcttcttagcagtcggcatactgtggctaatcttatgttttcactgggtgttaaatataaatagcaggtttggcttgcagggtgaattttctcaagcaaaatgatgtaatcattgtcttaaaagagcatgaaataaaatgaaggtagtttatagattaaatatagttgctcaagcttaacgctgagattattttcaggtttaaaaattgtaaagatttaccaaatggaatggtaaagtagtagggagagctgataccactttattcaatacgtacaaagtaaaaaataccctgactcttagacctggaaataatctgatgtgtctttttaggccagtcattgcctccatccaaaataaccccaaatggctacagtaaccaaaagagcatagtgtttgtacaagaacacatagaccaatggaacagaatagagaactcagaaataagaccacacacctataaccatctgatctttaacaaacctgacaaaaacaagcaacggggaaaggtttctctattccataaattgtgctgggagaactggctagccacatgcagaaaatcacaactagacaacttccttacactatatacaaaagtcaactcaagatagattaaagacttaaatgtaaagcccaaaactataaaaaccctaaagtaaaacctagtaaataccctaggacataggcatgggcaaagatttcatgacaaagatgccaaaagcaatcgcaacagaagcgaaaattgataaatgggatgtaattaaactaaagatattctgcacagcaaaagaaactatcaacagagtaaatacaacaacctacagaatagaaaaaattttttgcaatctattcttctgacaaaggtctaatatccagcgtctataagaaacttaaacatatttacaagaaaaaaccaaacaactccattaaaaggtgggcaaaggacatgaacttctcaaaagaagacatacatgtggccgaaaaacgtatgaaaagaagctcaatatctcagatcattagagaaatgcaaatcaataccacaatgagacaccatcttataccagtcagaatggctgttattaaaaagtcaaaaaacagatgctggcagagttgtggagaaaaaaggaatgcttttacactgttggtgggaactagcgtaaactagttcaaccattgtggaaaacagtgtgggattcctcaaagacctagaggcagaaataccatttgaccaagcaatcccattactaggtatatacctgaaggaatagaatttgttctattataaagacacatacatgtgtatgttcattgcagcactattcataatagcaaagacatggaatcatcctaaatggccatcagtgatagactggataaagaaaatgtggtacatatacaccatagaatactatgcaaccataaaaaggaacaagatcatgtctttgcagggatataggtagaacttgaggccattgtcttcagcaaactaacgcaggaacagaaaaccaaatactgcatgttttcacttataagtgggagctagatgatgataacacatggtcacatggtggagaacaacacacactgaggcctgccagagggcaggatgtgggaggagggaaaagatcacgaagaatagctagtggaggctgggcttaacacctaagtgatgggatgggatctgtgcagcaaaccaccatgacacatgtttacctaggtcacaaacttgcatatcctgcacatgtacccctaaacttaaaataacagttggaaataaaaaataaataaacaaaatagcccaaaatgataatcttataaagagttgtattttcaaatatctcaataagtgaagttttataaactacctgggaaattttaattttaattcataattttcttcatttttcaaagtaattgaggcttcccttggtaattaatttcactttttaaaaaaatcctggaaacctgtgaattaatttcactattaattaaggaagtttattttttatttttattattttttatttaaagaaggctaaatttgctcacagttcttcaggcttataggaagcatggtgctggcatctgcttggcttctgggaaggcctcgggaatcttacaatcatggcagaaggcaaaggggaagcaggtgtctcacatggtgggaacaggagcaagagagagtcaggggaggtgccatacacttaaaaaaaaaacaaaaacatatctcctgagaactcactcactatcatgaggacagcaccaagccatgagggatccacccacatgaccaaaatgcctcccatcaggccacacctccaacattggggattacaattcaacataagatttggcatgccaggtgcagtggctcacacctgtgatcccagcactttgggaggccgaggtgggcagattacctgaggtcaggagttcgagaccagcctggccaacatggtgaaacccaatctctactaaaaatacaaaaattagctgggcatggtggcacatgcttgtaatcccagctactcaggaggctgaggcaggagaattgcttgagcccaggaggtggaggtcgcagtgagccaagattgtgccactgcacttcagcctggccaaccagcgagactctgtctcaaaaaaaaaaaaaaggtttgacaaagacatatattcacactatatcattccacccatgtgcccccaaatcttgtgtccttctcacattgtgaaataaaatcatgccttcccaattgtcccccaattctgaacttgtttcagtcttaactcaaaaatccaaagtccaaaatgtcattgaagacaaggcaagtctcttccacctatgagcctgtaaaataaaaaactaattatttgctcctaagacacaatggcaatgcaggcattgggtaagcattcccatccccaaagtgagaaattggccaaaagaaaggggctacaggccccatgcaagttcaaaatgcaatcgttagaccttaaagcttcaaaataatcttatttgactcaaagtcccaggtccagggctcactgctgcaagtggtgggctcctaaggccttcagcagctctgcccctgcatctttgcagcatacagccccagactgttgagtgtctaggctgtttgcaggtgcagaatgcaagctgcctgtagatctaccattctggattctggaggacagtgggcccttctcacagttccacttggcagtgctccagtggagattatgtggggcttctaaccccatatttcccctctacactcccttggatgaggttctctgtgggagttctgcccctgcagccagtttctgcttgggcacccaggttttcttatacatcctctgaaactgaagtggaagttgccaagcccccaccactcttatactctgtgcacctacctataggcataacaccttgtggaagctgccaagacttatgatggcctatgctctccagagcagtggcctgagctgtgcatggagccctgtgagctgaggctggagtgggaagggctgggaatgtggggagcagtgtcccgaggctgtgcagggctagagggccctgggtatggctcacaaaaccactcttctctcctagacctctgggcctgtgatgggagggtctgcctctgacatctctgaaatgtgggccttttcccatcatctttgttattagcacttacctcccttttaggtatgcagatttctctagcaagtgattgctccacagcctgcttgaattcctcccctgaaaatgtgttctttctctgccacatggccaggctgcaaattttccaaacttttctttcagtgtaaagaaaattctttcagaattttctacttcccctttcagtgtaacttccaactttaagtcatttctttgctcctgcatctgaacataagctgttagaagcagccatgcctctgacacttcttcatcactttggtactgagaaatttcttccaccagataccctaggtcatcattctcaagttcaaacttccacagatccctaggacatgaacagaatgcagccaagatctctgctaaggcataacacatgtgatctttgctcccaataagttcctcatttccacctgagaccttggtggcctgtccttcactgtccatatcactatcagcattttggtcacagccatttaaccagtctctacaaagttccaagctttccctcttcttcttttcttcttctgagccctccaaactcttccaacccctgcctgttacccagttccaaagctgcttctatatcatcaggtatctttataacaatgcaccactcctcagtaccaattttctgtattagtctgttcttgtattgctataaagacgtatgtaagacttggtaatttataaagaaaagaggtttaattggctcacgcttctgcaggctttacaagcagcatgatgatggcatctgtttggcttctgagagggcctcaggaagcttacaatcatggcagaaggtgaagggggatcaggcatctcacgtggtggaagcaggagcaagggagaaggttctttatttggaacctgaatcattcttcattttctcccaaatacctacacagtgatgttacatgctccaaatgtattttggaattttacaaaaaaaaaaagccccaactattttccttataatccagattggatgtgtgcattatactaaggatttaacttgttgagtaagtggtagtataactttccagttcttttttttttttttttttttgacgcagtctgtctctgttacccaagctggagtgcagtggtgcgatcttggctcactgcaagctctgcctcctgggttcatgccattctcctgcctcagcctcccgaggagctgggactgcaggcgtccgccaccacgcctggctaattttttgtatttttagtagagacggggtttcactgtgttagccaggatggtctcgatctcctgacctcgtgatccacctgccttggcctcccaaattgctgggattagaggcatgagccactgcgcccagccttccagttcttttatttaatattctatattggaatggtgcctgaaaggtagaggcacctgttttttgtttgtttgtttgtttttcctgtgctagaatcacatgcttctttgactatcagtggtggagatggaacacggctaaccacatggcgggggcagttctgggacctcctgatatgacccatcagcagatcagttaacagtaagcacatgattgagtaattcaataatactgtcctaattaagaatcccatggttgggcatggtggctcatacctgtaatcccagcactttgggaggctgaggtgggtggatcacttgaggtcaggagttcgagacccacctggccatcatggtgaaaccctgtctctactaaaaaatacaaaaattagccgggtgtggtggtgcacacttgtaatcctagctactccagaggctgaggcacagaatcgcttgaacccgctaggcagaggttgcagtgagccgagactgcgccactacactccaacctggataacaaagtgagactctgtatcaaaaaacaaaaataaaaaaagaatccccaaagaaaattcttcaattctgcaaatgctgaatagttgtaataattattagagtatttttattgcactttgtttcacaggtaccctacaattatagtattcaaattagctgttcattgcaagaaacatttcagagtggttatcattattattctcattttgaagatgaggaaacctgtaaggatttggtttatgacatttgtgaattcaaaggctcctttctacattccattattcacactattaatttaagatatttgggtaatttgaaaaggaaataaaaaaggcatttcacacaaacactaatatatctggtagtaattaacttctgaaaaatgttcattcctagggctatacggttttagacccttaatatttaggcatgttcaatgggctcacagaaagtataattaggggagtggtcatattattccctgttcattatttcatttaggatttgctacttgttaaacagaggttagaatacatagaacatatacatccaactttttaaaacctgaaaagctcaattagctgagtaattcctgaataattgtgattaaacaaatatgaggaaaaaaattaaagttctcagtttgacattaaacatttaaaataaggaagtggtagagatacagattttatatcagtgtctcagagcttttgtccaaatatgttctccatattttttcttttttgagacagtctctcactctgtcacccaggttggagtgcatgggtggcgtgatttcagctcactgcagccttcacctcttgggctcaagtgatactcccacctcagcctcccaagtagctaggactacaggtgtaagccaccacaccctgctaatttttgtatattcagtagagatggggttttgacatcttgcccagtctggtctcaaactcctggatcgagtgattcacctgcctcaacctcccaaagtgctgggattacaggcatgaaccaccagccccagccccatatatgttcttttactgggttcttcaatatttctggacatcacttccttttatatttattcaatggaaagccagagcaaagaaacagaactcagacagtcaccaatatgtatggaatagctgctggggtcagaacgtggtctcaatgctcaggggaaccatgaagaaaccaagttccagattcttaccaacaataaaatctgctctctaagggggagtaggaatagattgaacaaatagaaatcctttgaccttactactgctctacagagtgggatgagatgattctgtaaggcaaggacagcaaaggcccaggaagagaagcagcagcagatctaaacaatggaaggagaaacagacaaattgtgtcaaagatgtgtgttagtctgatgatgaattctcttctaattccagaaatgaaactgaaactttaatttccagagtcttggctctttaaatgagtgagtatttatgaaaggacacagtctaccacagtatgtagaaacattgttgccaactctcatctctccaagataaggaaggttccctaattaaagaagcttaattggttacagtttctcaccactccagataagttttatacccaccagaagggaagatgatggctggaattgtttcaacagttgaaagactcttggggaaatgagccctttcttgtccagtgagaggaaggacagcacatccatcagccaatcagtgggtagatgggcagtaggttctcttgaaggctggtttgtagaggtggcccttggcatcttctcttataagacccacagatgtagccctgacccttatctaagtgaccagttagtcagtggctggactgtccagttgaaaacaacttccaatccttttaaaatttgtagctaaataacagttgcacatatatttcaaatactgcatttgggcttaaattcagacgtctgtaatataagaaacctgcattgcgtgcaactactataacttcgactactttagagagcagtctgttgatcaaagaaagaaaattccattacaaagcattagtttctaggggtgtaatagacagtatggtgagctgagtaggttttcttcctgggagcagagagtacttactacacaacaatgtgttaagaattaagaacagttagagaaaaagagggactaattggcagagaacattgccatgcttagttttgaattttaagtggatgttaggagaaatttgaagttgttgttctggaaagggtttagacaatgacacttgatacaggtaaattttgctgcagtttagaggaatccaatggcaaaaggaatgtgatgtggagattatgtagatattaggtttttaggatagaggggagacaggtgacattcttcccattttacagatgggaaaatgctgtgatttgaatgtgtcccccaaagttaatgtgttaggaacttaatcctcaatgcaagtgttgagaggtggaacttttaggaggtgatcaggtcatgagggctctgtcctcatgaatgattcaatgccattatcactggaatgggttagttatagacggagtgagctcctgatacaaaggatgagttcagctcccttcttctccctctctcgtgtgctctcttactttcccaccttctccatgggatgatgcagcacagagtcccttgcacatgtgagctcctcgatcttgaacttcccagcctcctgaactataagaaataaacctctgttctttataaattactctgtctcagtattctgttatagcagcacaaaaatgaaggaagacacaaaacttaagctcagagaggttaattctatttcccgaggttttatggctaatgaggatgatggatctggggcttaaaccaagttgtttctgatttcaaatcccatgcttttattctgaagataatcaggtaattctaacaaatatagtggatgaaacaattatagaaatctaacgatggattcagaaataagaaacaaatttgcttaagaaaattgaaagacagtaacaatacaatgcattggggaataatttctgtgtgggtcttcactacaattgctagatgttaacttagtttacatgaacaagatttaatggatcaagagtatttctcaaagttgagtaaggtatagacgccttattattatttccatttattttaatatttaagagatgcttttcctttttgtttttttataattaggcaaaagatggccatttgtgtggttccaaattcaaaaccatttatttatataaaattcaaaactatggctgggtgcagtggttcactcctgtaatcccagcactttgggaggccgacgtgggtaaatcatgaggtcaggagatcgagaccatcctggctaacacggtggaaccccatctctactaaaaatacaaaaagttagctgggtgtggtggtgggtgcctgtagtcccagctactcaggaggctgaggcaggagagtggcgtgaactcagaaggcggagcttgcagtgagccgagatcgcaccactgtactccagcctgggtaacagagcaagactctatctcaaaaaaaaaaaaaaaaaaaaaaaaaaaaaaaaaaaaaattcaaaactacattaactcaaaaattttcatccctgccccctccaaactttttttctatttttccctcatagaaacaagtttctattagttttgatttattctttcattatttcttcttgaaaatctaagcagaattgtatatttacattaatattcctcttcacttttcttgcaaaaaaaaatcctctataccttgtagttattattggtgttttttttttgtttttgtttttgtttttgtcttttttgagacggagttttgctcttgtgcccagattgggtgtaattggcatgatctcggctcactgcaacctctgcctcccagtctcaagcgattctcctgcctcagcttcccgagtagctggggttacaggcatctgctaccacgcccaactaatttttgtatttttagtagagacgggggtttcaccaggttggccaggctggtcttgaactcctgacctcaggtgatctgcccgccttgggctcccaaagtgctgggattacaggcgtgagcctccacgcctggccagttgttgtttttaacttgacaatacatcttggagattactccttattagtatgcagagatcttgctcattcctttttacagttgcatagcactccactatgatgatatcatagtttcttcagccagttcccattcatggacatttgagttctttccaatcttttgctattatacatagtgctacaataaatacctttgtgcacaatcacttcatatttttcttgtttatctttggggtatattccaaaaagtaggtttgggatagatgccaaaggtcaaaggtacaggaaaattccctccatgtggaactgtaccattttgcattttcatcagtattgcttgtttctttcctgcacttgtggtagagaatgttctccagcttctgatttaggacagaccctctcaaatggggacaattattgtggactcccagtgttgacttaagtgattttaattattatattacttacatatgagaaaacataaaattatatataagttctttatgcttatagtttttatgaaagtatacaactaaagcaaatatacagattaactataaataaactagaatcccaatacaatttgtgttaacaacattaatataataaatgatgttatttttctgaaatgaaatggccacttagaatgtgaatatggtattgattcttgtaacacatttttttaaacattgagtatgcatatgcgcaatattatgtgccaggtgtattggtcaagatcctttgagttacaggaacagaagaactagctcagcaagaaaacaacaacaacaacaacaacaacacctttttgtactgttttggatcacaaacacataattgggaaggtgaaaccataaattaagaaatgaatgaactcaggggttacaattatttcatttgaattctctacctctgcccctggttttatccatacagctttattctcagacggactttctctctctctttatccaactattagcaaagatgtcccatgggtagctccaagacaatagcatctttacaggtcaaggtcatcccagaaatataaaccccccttgttccctcccaaatccataagccctgaccaaaaatgacactgattggcttggttggatcatatgtcctcctttgaaccaatcactgaatcctcttattagccagcttgggtcatttgcccaacttactgggaagaaaggtagctctcttaattttcagccctaccaaaaatcccaaaagaaaggcctacaagacagataaagactgacagatacccatgccattgtgaaattactcaaattttccactacttttctctactgaaactattggaaaagcctggatgtagtacatgattgtgtgacttgtccttcatgtgataaaatttcatcatccacacattaaacctacttcagttctttttttttcagtgggactataccattggaagtagaattacttgaaaaaaacatagtcactgaaatgacatgatagttctcagttctaaagtgttattcagaatacacttacgtgattttaatttgaactgtcataacaatgagaacccaagattaaaatattcttagataaaagatccagaaaccacccacctccaatttgtgcagatgccgtttgaggattaactctttaaagcatggagaaaaattgaatactttcattaatgtagttttctaatgatttgtgtgatttttaatgtgctgataaatttaatatcaaattgatatgttgttggtattttacctacaatttataaaagcaaatacatataaaataaaaacaaatataaacatacatctgtatagcaagtgcaacacttgtatgctcaagagcttcagcttaattgagtttacttaaaccattaagcagagttttctgaactttcttctctgtatggtgagaaacccagggtctctctgaatatctcttaggattctcaggagtgaggggtactgttttctgtatcttacttctgcttcctttatcctgcaatgtgggattaattgggagtggagattaaagattagagaaatctgctttactgcctggaaaattcaatcccaggaactgagaaagaaatttggagatattcttaactattttgaaggtgtgtggataaaatttatgtggagacctaaaaaaattatctttttattttaaaaaattttaactggtgctaagcaaaatatatatatttaaccatctctttttttaaaagttcattttacccacttgtcttactttattcattctgctataacaaagtactataaactgggtggcttataaacaaataaatttatttctcagttttggacgcttagaagtccaagatcaatagacaggtatgtggcacactcctgtaattccagctactctggaggctgaggtgggaggatcacttgaacccaggaagcagaggttacagtgagctgagatggtgccactgccctcaggcctgggcgacagagcaagatcaagttgccagtagattcagtatcaggtaagggcctatttccttgttcatagttggtgctttcttgccatgtccttacatggtagaagaggcaaacaagtttcctctggcttattttataatgacacgaatcccattcatgagggctctgccctcacgacctaatcacctcgaaaaaaggccctactgcctaataccatcgcactagggattagatttcaacatatgaattttgggggaacacagacatttgaaccatagtaccacttcaggatgcaatggacagagatgaaaaaaagttactgattttgctcagctacagaagttatggaactggcatcactttattaattcaggaagtgcttctcatgtaactgaccttagtctacctctattggccaaagtttcctcatatataagaagggtatgtggagtatcatctctacaaatcattggcagctttactggttaataaagacacagtctttagagctgaaggaatgagaaaatggattaatatggaggttaacttaagatagagaacatttattcccttatgaattttgacttttaagaaaagacagcttcctcccagaagaacagatatggtgaaatggtaaaagatggaaaaccagctatgtagcaggtataaagacatgagtccctttgttctgaagcatcaagtctctacctaatgctagaaggaatttttagagaaatggaggcatagctacaaatgaagtggaaagaaaccctatgtatttgctttataaagaaactgtgactttgaggacagtttttacatttaggaaaaaaaatttaagtgggaaaaagtgtcaccaacagcacacaaaccatactgaaatgattgtgaaaagtctgaagtgactgaactcaagaatatgaagatctcaagatacttctttgcaaatatgtcccttgtagatgacaagtcccttgtagatgacaagtcccttgtagataccaaatcttggggtaaaatcagctttgtgaaagactcacttccatgtaaatgtttgcaccttctcaatgggctagaattttattggtgaatgttattaatggtaatgggacataggtacacaaatccttttctgtgtcactgggagatgggaactcttagtatgcaaagtctctgctgaaatcaaagggaatttgcataagatccacattggttgcttaacgcatagtgtagctggcatccagtgcatgctaaaggacaacataaaaacctcaaacacaaaatggctctgtgcattaatgctgcttaggaaagtgctagctattaaatattttcaccagtattaagtatcttgatatttattcttaagtaagattttgaaaaatacttatcatcacactgcagttgatatgcaaattttaaagcaacatttcagaaagaagcaaaataatgccaccaaactgtttataaattcttccatttaaaaatagtttgcatcatataaaagttaactccaattctctcataccagttaaacaattatttcatcaaatggaattgaatcttagtttctcagtttgcacagagaagaaaattcaaaagaagaatcagaaattaaattgaagtttaggcaatgcatttttaggcaaaaataatagtaatatatggctgatattttcaaagcttggcttttattttaaattttaaatttatttttattttaaagcttcaacagtgttttccagcaggtgtcactgtaggcaaatataaaatgacaaatacatcgtttctacagcttgcggccaatggttccttgagaaaaagatttatattcagacttctcaattatgattttgtttctggtgttgtcattgttgttaatattagtctcctagcataattttctgttcctattgatgcattcacaatgcagtaacactacccagttgaatgaacagaagcagtagtatgcactatgaagttccacccagtttgggggtagaacttttaccatttatagaagagaatcctagaatcttgaaatgcctatctaattaagatatattttaattctgaagcctctggcggatttttcctaatagtcttaattagtaatttctgatttttatggttgctatataaactttgttaacgaaaaaactctaaagtttcatcaggaaggaaaagctttaaaagtattcggcaaaaacagttatcattagtctgggatgggtatatgaaaggaaggaaggacgtaataatgttactggttaccttgaaattatacttcaatggttgggttagaattgaattcatattattcagcctgcaaaggatgtctcattagttcccagagaaaccatttctgaacatattatctcaaggaaatccagagaatccattatttctctttgcccccttctttttaatatgcacagcacagagatagggaagcagaatgataaggtactagcaggagaattttccaggagttattttgctgatttcaaagtcttcctgtttcctggtatccgtaagcatcttggcatattgttcagagctcctaaagaagtgttcggtctgcatctacaggctagacttggctgctgacgatttgacatgtgcagacagatttttaaaaaaacgtatacaagagaaactggtttaaaatacccttctcatctcatgcccaatacaaagacccacatgactgaaaaaatgttttatacacttgattcttaggagaagaaagttgtattccatgcatccaagcaggtaagcaaaaatattactttctccattttataatcaactcacaaactctcagggaaattgctggttcctgtgactacagttctgaatcccaaaataggatccacatctcctgactcacttctttcccctagaacacatcgcctaaaataggcgcgttttttagaatccaaaaacatgttttccttttaataatgtcagcgtttactgagccccaactctatatctggactatgctaagtactttatacgcgtttctctcaattcattttcttcttgctctcctttcctatgatgtaggtactatcattcgttttatactcacacaggaatagattcaaagagaacaacttgcatgggatactgcagccaggaaggacagagaagaggcctggatttgggtctttccaaatccaaaaggctttgttcttaaccagtatactcccacagcaaatatgatacattatttaggagaataacaaactatccttgggaagttacacaaaagaaaccaaggcacttttcctgtattctgtatgctttaggttagaaccagcctcatcctgtccaaggtgtttcagctatagccctgtatggtaccggctgtgttcagaataatgcctgcaattcctgatggcatttccctgatttcacttattatatctatagatttaaggtaagattcttaacaaaatcaaaggctcttctgggaaaagacaataactagaaactctgagcattgtaaatctcacagcctattgcattttaagaaagtgtagtaaatataatgaaagaacttcaaagaactactcacagttcagtttgcaccatgttagaatatttccatttgaggccctttggaaaggcatttggactgtaactttagtaattgcaatgaagttaagagtttacagtggatttaaagtcagagagtcttggattaaaatctttgctgtgtcactttcctgaacctcagttttctcatctctaaaatggtggctaatgtaaaaatagcagcagcaatgagtcagtggttgttaggcactaagcaatgttctaagtgctttacagtcatgtctttctttatgctcatagagctctttacacaatgcatggcacatattagaaagccaatttgtttgcttgtttcgttttgtttttgaaatgaggacagggactctgacaaattcatctttaacattataagggaaactaagaatctgtcttaaaactaggagtctgtgttaaggaatcactggatatttggattttattttctcattttcctattagttcattaattctcacttaattgcatgcttttgtgtcctatcatgaccaggaacttgttttcctgtccaccttcttgttttcaggaacctgtttttcaggaacctgttttcttgtccaccttcttgttttcccacgttatttccttcaaaaacctcatggcctctcttctcctgggtcccaggcactggagggtgggacttgctgcctgtaggtgcaacctgaacccagtactcctacaccagggttaggagttagtgcttctggtaggaataaagttacgttcaagcatgcatgtacacatgcacgcacacacacccacacaagttaaatcatatatatgagttatagtaaaatcatttaaatgaatttacaagtttatgtaaaatatcaaacttttcaaaagataatgatttatggtgtcaaaggtaacgtgctcgttgaagaatactgggaaaatagagaatatatttagagagaaatcataatctcagtaacagaaagagtaagtaacattgtattctttctttctaaatatgcttaacttaattcatgtgattttgtatcttttaaaaatatgcttttctgctatagattgacattgaaagaaaaaagacatttaagtttcttgtgattcacaatagtaaaacatggcactcttacttgacaaaggagaagccactgcagaaagtgattttagtccaaaatcgtgtttctaacaatatttgaatagaacagttatgcaactgcctctcctagagtgtattagacaagtcaagaggctcttgcagccactgaagagatactgagggctgggcgaatgtggaagccacttggaccaagagaaggtggtgtgctgggctgagtgggggattcctaccacctgggacttgcagggtggtggtcaggaatgggtatagtatagccacagcctgtgtgctggagaacaaaaagcatgaagcaataactctgtaagagtagttaccctttgaaaataagtggatacaatgagctcaagctcaatagaagagttaaggtaacaaacatgcttgctctctgatattaggaggtttttaaaggctacagatgttaagacttccctgaagccttgaaacccttgggtaaacacaacagaaagatgtgggtgtgctggagcctgtggttatttgatgctggaacccaaggtgtgacgtgtttaaggccttaacttcagaataaaatggaaaactgaagttaaagtggactaataatggctgaggtttaatggtaatactgaatttaaatttctttcaactttgccctaagttacgtatgtatgtctctttcctctgctttgtgtgccctccaattacctttccacacagcacacaaaatgatcttgtaaagaagtaaatcaagtctcatcacttgcctgcttaaagttttcctaaatggcctcctggatgtggctgctatgaccctcctttcatcatcctcagcttcagtgaccttcctgaacctctactgggctgctccaacctcaattctgcctctccaaccccttcctctggttgatgtcagttctcagcttggtgtcactgcatcctggaaaaagacagacacaagcccccaaaaagatagatgcacagtgttcatttaaaaagagaatgagttttcccagatctccaggtacttgcagtggtctatgtggccaggcaaatatttatgataatttacacacaaacatatatataggtacacacagacacagacacacacacacacaacacaatatcatttccaggagtgtaaagacatttgatctttagaatgacttaaaacgaaaactagatgagcatatgtgtgaggctgaaagtagttgtgagttgcaggtagatagctgaggttagatcagcagcatatttacatagtattaaaattagtagaggagatactggtaaggaagaaaaagcagtacggagtttgtagagacatttgctgcaagattttaatgtgaatctcagtaagcatgactcctcggaggaaaatgcctgagaggatatcccatttattcgttcgtttccttcaaccatatatcttccttcatactaaaaaaaaaaaaaaaattaaaacagcttttgactttcccagaactggctttaagcataaattcttttcctaaagaaaaaattaggaaagatcggtattggaaacatctgggtaaccattcagagagccctgtgctgtagtggacccatccatccttcatccttccatccatcattggcctaaaatatattaaataccagctaaattccagatgctatgttaaggactgggcattccaggacaaatattctttcccattgtgggggatgagcttaagctatgaaacagtctcatgttataaaataatgattggattgagaaggaagacaggaaagaaacccttcccttcttccttgggtactcttttcctcaccttgtctgtgaaaacaaaaagcaagtctctaatgtgagaggtttccacttggctctaagtacagcacccaaattaaagtcagagttcaataacagtttattaaatgaataaatgaacatacaaattactatatcccaaagccttcagggatccaaatttgagaatataataatgacattttcttctacaaagtcaaaatataatcaatgaaataatcttttcagaagggagcagagggtaagtgtcaagttgagaagaacttccatgattagctttcttcccaactcagaccatctaatctttttctgctaagggtcacccagggccacctctgttgtgccttctcctgaactcatcctgtcccctgccacttgtcatacttcatcccaaccctcaatcctcagccagttttgtctcagtcctgaacttcagaacactctccctcttcctgggccttcccctctcatgctcctctttccaccttcatttactggctaagaaactcgcacactacagcttctgcacagcagatttcaagttaaggcctcctcataatgaggaatgatgatgtgatgtgggcgactcaagggactactatacttcacaatataagggaactccttgctgtgggcttttatccacatctgtatttacccactccttctcagaaacctgtgtctataggaaacaatctataaaactaatcactgctgaggtgcagctgattgataatgacttaactttccctaggcaaattagccttttaaagtgggctcatagaaaaacaatgcctcagtgcactcttgtggtagaacgtggggttttgtagcaggctgctgaggaggatctatttgagctgtggtttttcctgatgatgatcttcgatcaagagcaggcaaaaaagactgcttacatctgagcctgcagaacattgactccatctatgcatttattcctcacccttgcatagagttcctattatgtaccaatactgtattaggcttataacgaggaggaaaaacagctctacctcaaagagctaagagtctagttggtatatagacgtacaagtggatcagtatgacataacattttaagtggaatgataaagatgcacataaagtattggaagaacatctgagctgtggacaggggacatagggctaggtagtagatggacaaaatggcaggtaaggtcctgaaaccacccatgcttaacttatgataggatcagagaacttaagacctgtcagatgactgtaacaggctgaagtcagaaaaacagagcccacagcaggcagttcaacagaaataatttaatatggagaggtagttccaaagctattggaagagtctaaagaacgaacaggggacaggaaggaaacccagaaattagcaacagtaggaagctggtaggaagctgctaatacccctgaagctggagggacaaagggtagagctagtgttggaaagcccagaagacaggactgcctgatgggagctggaaccacagagggacatagctactgccaaagatacactggaagagagagacaggaagatgttccctagtttgttcttttcttttcttttcttttctttcgagtcttgctctgtcacccaggctggagtgcagtggcatgatctcggctcactgaaagctctgcctccctagttcccgccattctcctgcctcaggctggagtgcagtggcacgatctcggctcactgaaagctccacctccctagttcccgccattctcctgcctcagtctcccgagtagccgggactacaggagcccccccaccacgcccggctaccctagtttgttttctgtctgctcttgaatcacttttcactgtctctcattggccaagatggccgcaggccatatagcaagagtgtctgggatacaagtagagcaaggatggtatgtggggttggatctgggggcaaatagacacattaccggcacagtcatcttagttgtcttatgtcacctgtgacagccgtcatttgctcaaagttgtcctgtttgttttgagtagaaccaagtctggaacttgggtaaggtgagaagcagtgattaaagtagaatttatgggggcactgttatgttccagaacacatgctaggcttctcacaagtattatgtcatttaattcttcaaatatctgtttacggtggctttctgactctctgttcagtttgttctcaaagccaaataatctaacattaaaagagaaaaagaaaaaataatgttatctttgtgctgtaaaatatttatggaaaaatacttaggtgaaggctaaggaatcttgtggtatggtttagtatctattccaacttcattctgcattagacttcacataggataggcctaaggatgctaagtaagtagattccaacatgtggctgagaatccctggggtctgcacatgcacacttatactttgacttgagatttggggctgtgctctgtcttcacagcagtattctgctacttttcatatgtatgccattgctaatgggaaaaatacacatttatttaaaatcatgaggaaattcagagtagctttttgtaattttgcacactctcaattaatggataaaatatatgtgatcgctgtcatgtggtgatctgatgaattttgagagctggaaaaggacccttcatacttggaaaagtaggaaaatcatactgtgaaactactaccatgggaaagtaggatattataggaagagctagcccaattaatgacagctaccatttgttaagtgtcctggtgctatgcgtggttaaatcattaattctcacatcaaccctataggtgagccatattattattaagattcctgttttacagatgagaaaacaggcacagaagaattaagtgtggcctaaggtctttgaacctgtggtaagtggtagagccaggatttgaacctagccaatttgcttctaagcttcacatttttaaccactgcttgttctccttccaattttttaaaatctcctctcctatgtgttaaatcacatcaagctaaaaaagaaaattgacaaaagggtataaggaagatgattacagacccataaaatccattggcagtaaactattaatacaaatttacaggaattttactatatttaaaaataccattttaattttggtatctttagatgataaataaaatgttcatatatatttcttctcattttcaaactcataataattatgtaattttcttcaccttagtagagcaaactgttaataaattgagtggttagtgcttaaagactgttaaaaaccacttcaaataacatgccaatctcatctttacagtaataccaggttgttaattagctgaactacccaaatacagagattatagttaaaatggttttgagtgggtggtgataatgatgcactgcctgttttacaacatgctccatgccatgcacttcaactcccattttttaaaataaaaatttccaacactatttttcacccttttcttaagagagagattccactgaaaaataaagttcttgctaattaaatatttccataaacaatggatctcgtatcaatggggaaatatgtaagaatgaactattcaaagaagggaatttttctctgcttgagtacacaagaggaaaatgtcattcctgttgaacgttttggaaatgccacttttagaaaactttaaaataccatgatggttgatttttttaaaatagtttctatttggaaaaaaaaagtcactttcacgtttcagtagcagctactcttgtataatcttcagcaccattaaagagatctctagtcttaatgtcattgctttttttctagagaaagacctatggtcattttgctggggttgggggaggaggggcaaggattaatggtctttattgtttcttcgtttccagtggcagtgcctttcatcagggctgtcttgaacagccacatcatgttcatttcattctatagccaaacagcgtttgttcaacaaacacttcttgagtgtttccaatggtccaggccttgggcaaatctggggatattttcattagtaagaaataggtcctggcctgaaggagctaccagtcaaggagagaagtctgatatgtaaatgtaaaattacaatcaatgtgtttatcattgtaaaagacatcccacatagagagctgtgggaacagaggcaaagaccatgatctatgcctttgttggggaaggaatggaaaacagcagggtacagttggccaggagaagttttgcgaaggttgagcatctggaatggtggggagggtctgtcaggggtgtggggaagagcacttcagttggaaggaaaggcataaagtcaaatggaggtactcaagaattggacaggcttgaatttgagttatagaccggtaactcctgtaccatgcaatctgagcaaactccttatcctcacataataaaatggggacagtaatccacattgtgcagcattgcagggaggattaaaaataatgtacttaatgtgtctggtcccgtgctaagcaccgaccatcgcagggagggcttctcctcttcctcaaggtggttcctgtaacagcttcaatgtcaccacctgaccaccatttttaaagccacctctcactgcagcatgttctttatttggttacataatggtggccagtttcctccagtaaaatgcaagttctatgagggcaggatttgtcttgttaacagctatatctccagggcctgaacagtgcctggcacatagtgggtgcttaataaatattattattgtcactaatgttataatggtgtgaaaagacaaggtgatttatagaaattatgtggctgtactttggagttcattggaggagatgaagctgcagaggaacactcaagattgtaagaagctaaagagtctgaattttatctggcaggtgcttcagtaggtttttgaataagaagcaaaatttaccttgtcagtagacactatgaagagaaagtcagcaggttcttggtactgttatgtaagggatgctaaaggctcacctattctgactttgaggaaattctctttctaatttgtctcctctattgctttatctgaaggaattgaagttctctgtatttgggagtcacacaaacattctattccagacaaacattactcactctcttcattaaaaaagaagaatcttaattatttaggtaagcagatccttgcaaagttaattgtttcatgtaggatcagagagtactggagctagacccactttaatttcgtggagaaggaatggaggtccttacagatggttatagaaccaccgattctccagtctgtgtttcttccaccgtgcttcactgtctttccttcctggaaatgttttgtctgcctgtctgtcttactgtaaaccttctggtagggctgtcattcaaaagcctattgctctagatacagtgatttttttcagggatgggcatttgacccaagcagtcatccctggagtggatccatgggtgcccatagaattacctacatgtttcaagttaaatgctattaattaaatgaatgggtttaacaggctgtatttatgttttgccaaatgaaattgcaacacagcaattcacatggtgggaatcttccaacttcatgataaaataccttcctgaaaacctgggacactgtagaacagaaagcgtgagctatttggttatttgctggatgatgttaagtagcaaaaaggatggtaaagacattaatacagtaaaatatgtgtgttttgcaatactaaatgaatatggtcaagaaatgacaccccacctttcaagtttatctcagcaagatttatgctcaatgtttcctatggatgccaaaaagttttacaattatactaaaaagataaaatattactttgcctaagcaattttgcctaaaattgtaactcagagtgctttgagaacatgaatatttttcctttataaatatttttgtgttctttattaacatatagttaatctcacaccataaccacatgtatagatgtttatactatatagagaatatgagcatttcataagcattttatgccatgcttttcttttccattggatactatagtacacattagtacccaagaggttcatttcttcttcttgggctgaatggcccatttatccgtggtgaagtgagttttttacacacatattgtagaatcatagactccagtgccttgccaaaggctctgtgccaggtgctacatctataaagaagattaagatgccatctttgccttcaagtagttcacattccagtgaccaaagtagttcacagtccactaaccaagttattagtgcagagattgtatttctgtggggacaggcactgcatatgtattcaaggaacacttgcccatacaaatccatataaatatagagtctactaataactaggaaactgttgggagatttagtgtactactcaccttttctgcattttgaggtgctcatcagtggagtacatacacgaagatccatagccacacaagaagtgaactttattgctagaggttgatgccctgtaacttcccaaacataatgtttccagtaagttttgtcctagaagctggcttaggcttgagactgaacttgggcttccctcccatccagtggaaagagccaggctcacaaaaatcctgattcacttgtcaatatgtggtaaagagataaaaggtagccctgttctgttgtttttcatgtagagagataagaagcacaatcaggctctccatacccagatgggggaagtgaaaagaggggcaggtacacacttaatacctcagcccagcaaccaaaaccactaggaaaatgtattctgatgaatgttgcatttacaaccttgatagttaccccaaagttaggccttatagaccttagggtctatgataatcattattttacacctttaattttttcttctttaatataatatgtctcagaataatccttgttgaaaatccatcctttatgagcaatgcagatggcacaagatggacgaaccaggaatgttttctgtaaaaactcctgaaaaagaaaagaaaggggtctcctcctcctttgtgggttgagacaaatgtgagatgaggaagaaggatgcggcattcagggtcgactgagttccagcaagggtccagaggtagaagagagcaaatcatgtttattgtgtgtccgaaactttaacgttcaagggccgaacaaggagagagaaaagaagctagaaataaagctggagtggtgacacagagtggtagggaatccccttactcccgtactccctaaatttagcttttatgctgaaagctgtggcctgtccttgaaaatctggaagcaagagagtgacaggattaggttggaattttagcaaaagcacttcagtgtgaagtggagaaagattagaagggactcgttatgggttgaattgtattccctttcaaaagagatggttgaattcctaatccccagtacctcagaatgtgaccctctttggaaatagggtcactgcagatataatttatgatgagtttttactggagtaaagtgggcccctaagccaatatggctggtgtccttatttttaaaaaagtgacttgttcacagagatagacacacataaagggaagatgatgtgaagagacacagggagaagacagccatctacaagccaaggagaggggcctggactctcccctcagagctgtcaggagcaactcaccctgttgacctattgattttgaactttcagcctgcagaactgtgagacaatacatttctgttgttgaagccatccagtttgtggtattttgttatgcagccatgggaaagtaacacagactccaagattgaagaccgagtaagaggactgacgaaggcctgaattaagatggaatgaaaagaaagctcttgaaagatatttaagaagtagaatcgatagaatttggtgattaatcaggatgtgtggagttaacatagtgagtaagatagacctacatttcagtcctggctctattcctgcttaatgatgtcaacttaaaccatttatcttctgtgtgctttagtttttttcatctctagaatagaggtcataatagtttctctgatggttaattttatgtgttaacttgactgggctaagggatgcccagataggtagcaaaacatttctgggtgtgtctgcgagggtgtttccagaagagattagcatgtgaatcagtagactgagtacagaagatcaccctcaccgatatgagtgggcatcatccaatctgttgagggcccagatagaacaaaaggcggaggaaggacaaattacctctcattgttaaccttttcctgccctcagacatcagagttcttggttttaggcccttcagtcactgggacttccctcagtggcttccctggttctcaggtgtttgggttcagactgtgttataccatcagctttcctggttctccagcttgcataatcatgtcaactaattttcataataatatctctttcttagatagttagatatagacatatactggttctgtttctctggaaaacacgaatacagtttccatctcattgagttgttgtgccagacaagagaatgaatgttaaaatcttattacactggtataataaatacttcacatagtaatattgataaatataataaatactcaatacttttaaaaaatgtttatttcaatagtttttggggaacaggtggtttttggtcacatggaaaagctctttagtggtgatttctgagattttggtgtacctgtcacccaagcagtatacactgtgcccaatgtgtagtcttttatccctcaccccgctcccaaccttcccccaagtccccaaagtccattgtgtcatgcttatgcctttgcattcttatagtttagctcccacttatacttataagtaagaacatacaatatttggttttccattcctgagttacttcacttagaataatggtctccaactccatccaggttgctgcaaatgccattatttcattcctttttatggctgagtagtattccatggtgtatatataccacattttctttatccactcagttgatgggcatttagcttggatccatacttttgcaattgcaaattgtactactataataaacatgcatgtgcaagtgtctttttaatataatgacttcttttcctttgggtagatacccgatagggagattgctggattgaatggtagatctacttttagttctttaagaaatcttcgtattgttttccacggtggttgtactcgtttatattcccaccagcagtgtaaaagtgtttccttttcaccacatccacgccaacatctcttattttttttttttatttttaaattgtggccattcttgcaggattaacgtggtatctcattgtggttttaatttgcatttctctgatagttagtgatgttgagcatccttttatatgattgttggcaatttgtatatcttcttttgagaactgtctattcatgtccttagcccactttttgatgtggttattcgttcttttcttgctgttttatttgagttccttgtagattctggatgttagtccttagttggatgcatagtttgtgaatattttctgtcactctgtgggttgtctgtatactctgctgaatatttcttttgcttcgcagaagccttttagttgaattaggtcccatctagttgtttttgtttttgttgcatttgcttttgggttcttagtcatgaattctttgcctaaggcaatgtctagaagattttttccaatgttattttctaaaatttttatggtttcagatcttagatttaagtcattgatctatcttgagttgatttttgtacaaggtgagagacaaggatcaagttttatttttctgcatgtgacttgccagtaatcccagcaccatttgttgaatagggtgtccttttcccactttatatttttgtatgctttattaaagattagttggctataagtatttggctttatttccgcattctcaattctgttccttgactatgtttataccagtaccatgccattttggtaactatagccccttgtatagcttgatgtcaggtaatacaatgcctccggatttgttccttttgcttactattgctttggctctacaggctcttttttggctttgtatgaatttcagggttgttttttctagttctgtgaagaatgatggtggtattttgatgggaattgcattaaatttatggattgtttttggcagtatggtcgttttctcaatattgattctacgcattcatgagcatgaaacatgtttccatttttttgtgtcagctatgatttctttaagcagtgttttgtgattttccttgtacagatctttcgcctccttggttaagtatgttcctaagttttttttttttcagctgtcataaaagggattgaactcttgattttattcccagcttggttgttggtgtacagcagtgttactgatttgtgtacattgattttatatcctgaaactttactgaattcatttattatatctaggagctttttggatgagtgtttaggattttctaggtgtatagtcatatcatcggtgaacagtgacagtttgagttcctgttttccaatttggatgccctttgtttctttctcttgtctaattgttctggctaaaacttctagtactatgttgaatagaagtgtatgctttccccctgagaactggaataagacaaggatgctcatcttcccacttttccctattcagtgtgatattggctgtgggtttgtcatatatggcttttattactatgagatatgtctcttcaatgccatttttctgaggcttttaatcataaagggatgctggattttgtcaaatgctttttctgcatctattgagattatgtgatttttgtgtttaattttctttatgtgatgtataacatttattgacgtgcatatgttaaaccatccctggtatgaaacccacttgatcataatgtattatctttttgataaactttcattgaggatttttgcgtctattttctatgtttatcagagacattggtctgtagttttcttttttgttatgttctttcctggttttggtattagggtgatacgggcttcatagaatgatttggggaggattccctgtttctctgtcttctggagtagttgtcaataggattggtaccaattcttctttaaaggtctgatagaattcagctgtgaatccatctggccttggacattttttcgttggcaatttttaaattactgtttcagtcttgctacttgttattggtctgttcagagtttatttcttcctgatttaatccagaagggttgtatatttccaagaatttatccatttcctctaggttttctagattatggatgtaaaggtgttcatagtagttttgaatgatcttttgtatttctgaagtattggttgtaatatctcccgtttggttcttattgagcttatttgtatcttctctcttcttttcttggttgatctcgctaatagtctatcaattttgtttatctttttgaaaaaccaacttgttgtttcatctttcgtattttttgtttgtttgtttcaattttatttagttctgctctgatctttgttatttcttttcttctgctgggtttgtgtttggtttgttcttgtttctctagttccttgaggtgtgacattagtttgtctatttgtgcttttccagactttttgatatagggatttaatgctgtgaacttgcctcttagcatggcttttgctgtatcccagaggttttgataagttgtgtcactattattgttcagttcaaagaatttttaaatttccatcttgatttccttgttagcccaaagaccattaaagagcaggttatttaatttccatgcatttgtacagttttgagggttccttttggagttaatttccagttttattccattgtggtctgagttgatacttgatatcatttcgattttcttaaatttattgagacttgttttgtggtctatcatgtggtctctcatggaggatgttctgtgtgctgatgaaaagaatgtatattctgcagttattgggtagaatgttctgtaaatatctattaagtccatttgttctagggtatagtataaatccattgtatctttgttgactttttgccttgatgacttgtctagtgctgtcagtgtagtattgaaatccccactattattgtattgctgtctatctcatttcttaggtctagtagtaattcttctatgactttgggagctccagtgttaagtacatatatatttgggactgtgatgttttcctgttggactagtccttttatcattatataatgtccttctttgtctttttttgatgttgttactttaaagtcttttttgtctgatataagaatggctactcctgcttgcttttggtttccatttgcatggaatatcttttttccacccttttaccttaagtttatgtgagttcttatgtgttaggtgagtctcttgaatacagcaggtacttggttggtgtacttttatccgtgctgccaatctgtatcttttaagcggagcatttaggccatttgcgttcaatgttagtagtgagatatgaggtactgttctattcctcatgttgttgcttaaataccttttttttccattatgttattgttttagatgacctgtgtgatttgtgctttagggaggttctattttggtgaattttgaggtttttgtttcaagatttagtacttcttttagcagttcttgtagtgctgggttagtagtgccaaattctctcagcatttgtttgtctgaaaaagactttatttctccttcatttatgaagcttagtttttgctggatacaaaataaattcttagctaacaattagtttgtttaaggaggctaaagataggaccccaatctcttctgtcttgtaggatttctgctgagatgtcagctgttaaactgataggttttcctttataggttgctgatgcttttgtctcacagctcttaagattctttcctttgtcttgactttagataacctgatgactgtgtgcctatggtgatgatctttttgcaatgaatttcacaaaattcatcaaggagttctttgagtttctcgtattggcatatccagatctctagcaaggccaaagaagttttcctcattttttgcctcaaataagttttccaaacttttagattactcttcttcctcaggaatatgaattattatgcttaggtttggctatttaacataatcccaaatttcttggaggctttttaagtttttttctttgtcttattgggttaatttgaaaggcttgtctttgagctccggaattcttccttctacttattctagtccattgttgaaactttccactgcattttgtatttccctaagtgtgtctttcattttcagaaattgtgattgttttttctttgtatctatttctctggaaacattttcatccatatcctgaattgtttcatttctttaagttggttttcatgtttctctggtatctccttgagtagcttaataatcaacattctgaattctttagctgacaattcagagttttcttcttggtttggatccattgttggggagctagtgtgatccttttggggggtgttatagaatcctgtttttttcatattaccagaattaattttctgggtccttctcatttgggtagagtatttcttcaaattgttcttgaatttattttttattagactgtttttttttaaatttaaatttcttttcccctgctcttaaggatcagattttagtatttattttagtctaatttgatttattggtgctgtagaggtgaagactctatatgagctccttagttatagagagtctttgtctgctggctttcccccttgctagttgtagtagttatattcttggtgtgtgggtgagttcactgttccctatggagttggaatggcagggatctcttgaagcttatcttgttctctagtagtgcatattttatttaattttttcctagtgttttatttactgagttgatgagtcagtcttcatgccaataggggaggtaaccctgggtaggcaccagttgtgtctaaggcagatgggtagctgtaatacccaatagtgggctgaggccttggccttgatgagggtgggtgggggagctctcaattagatgtgctgaggttttatctaggtgaagagtgggagctacctcagctcccctgccaggccagcaggaaagctattcacctcacagcctcactcccatcctagtatttcagctattcagatcagacaggcacttttcatctacagggatgttgatgttccaagtagggaagaattgttactctgcctctcatgcaggcctgaatcttgggggtgctcttcctgtggggctgcattcaccctgaatttttccagaaaggctacctataggtgcctccatgctgcattcctgtgggggcagccccagctgtgtctacagtggagtgccagggggaacaaggaccccttttccaaggcctttcatgatcacagcggcagcctgcctgttggggtagaggtgcagacttcccctactatgcccagcactgcgattgtatctctgctgtgagaaactaccctccagtggaaagatctggttctcaaggcctgctgttcagattcttttgtcccacagggtgatcccttgatgtggtgctctcccacttcccctagggatggggctccctgagagctagactgcagtgattgttgttgctcttataggtctagccatccagtggggctaccaggctccaggctgctgctggggaatgtctgaaagagtccagtgatgtgatcgttcttcagatctcccagctgtggataccagcacctactctggttgaggtgtcaggggagtgatgagattccttgggtatagatagtttagtgtgctggctttcctgagtgctggttatgctagcagtgaagttgtcacgtggacagactcaggacctctggttagccaggacgttgcaggcagtggaattaactgttgttttctccttcccaggagcaaggttattctgtcatgagttgccgtaatgtcctgagttggttggcctccagccaggaggtggcgcttgcaagacagcaccagctatggtagtagcagtgggatttgagcttgccctaagttgaccaggggaagtattctgcttcttaagcaatgggcgggaccataaagctcccaagactttatgtcttttgtgttcagccaccagagtgggtagagaaagaccaccagctgggggcagggctaggtgggtctgagctcagactctccttgggggattggcggtgggtggttctccagccaatggggttatgttcaagaggggattatgctgcccctgcttagcagtattgttcaccagggaagtggggaatagccagtagccaaaggcctcacccaattcccacaccattgatgaggctggtgtggctcctgcagtccccggctaacagtgccaggtttggattcaggcagcctgcacatagagcccagacctgtaccaggcccatattgttttgttttaaataaaatatctggattacattaaaagaattgagaataattcataattcttacctggccaggtagggtatgttattattcagtgagaggagaaatattggagataaatgaatttgggtgtcaggatgatacatttggtatattaaaaatatacaagcaaattatatgttactaaaaatacactgccttacctttaaggtcagctttcataaagttcaagttgtatatttttaaattaacaaaaagttatatattatccattaaaggtaatctcatatggaaaatgaaatgatcaccatcatgtttctaggttattagggaaaaataatgacaaaaatcatatttgtttaaaatcttttaaaaaaatttatattgattgaattgactgttacattgaagacagaaatattgacttttgacaacttgaccaacaattagttcttaattaacctgaagttgtcaacttatgatcactctctcttggatgaatgatctcaggcaatctataacagagaaattgagtcatctgacagaaattatctttggcaaggttttagtcctagggttaccagatggaatacaggacatccatttaaatttgaatttcagataaacagttaacacttctcaaggataaatatgcctcaaatattgcacgggacatatttatactaaaaaaaaagtgttttttttttttcctgcgattcaaacttaactggtgtcctgcatttgtatttgttaaatctgtcaatcctatctcagtttcctttgatggaatgtacctctgtgctaatatttaaaaataggttacatttgtgctcgcttcggcagcacatatactaaaattggaacgatacagagaagattagcatggcccctgcgcaaggatgacacgcaaattcgtgaagcgttccatattttttaattgaaaatcattaaaaaaaataggttacattcataatcatcctgatttgagatatattttgcctaaaacttggtctacatgatttctcaaaatcctttcttgagcccaaggatttgcaattcataatttagtgaagaacatacaaagaaggacattattagtaaatgctttgctaaaagcaatgcactatttaacagtacaaagaagtcgaaagggtcaatcacatatgcagtgtctcagagtgatattttcataagactttatttaacacactaatttccacaggtggaactttgttttctccctatcgatgggaagattagtaaaacaaaatgagtgtacctgcttgtttcatgaagatgacaaacctctttgatgtgtttacctttgtataatgttttcatataccatttatataattataccctaagaaataaaatcactaggtattttaaaaattattagaatcatggtgacattttaaatgaataggggatgaaatgagatgggctaaataccatgtgatttcaatttagactttaaatatatccatggggtccccatagctttctttccaatggtctattcccatgcctttcgaatttcaaaagaagatatcatgggaccatctgcctcagtcttgagcactcacaaccaaataatggcacacataagaaacctggaaagttttacttgtaaacctaggcctggtttggtttgctgcagaaattacaatggttagtttgtgattgttcacttaaaattaatcagatcttttcttataaagaatattactttgacttttcaaaatgacttatcttcttactttctgtgactttccataaggcttatgaagtagtcatgcagaaagaagagaactgtacttctaatttccccaaatatctacttacatattttaaaatgggtatgaataattaaaaggcctttggtaaattagaaacacaaataaattgaacttcacttctaaggagaacaaagcagtaatagtaattcccagctcacaaattctttgagaaattcgagatgatctatttataaaattctaacatatttggggggaaaaaaggcaacagaaggatttgtccacaccgttttctcattggcccatgatcacagagctgttcagacctgtcttgtcacctccagaggacacctacgggaaaacctttcctttgtcttcagcaaatggacttctcttgctctttcttctttttgttctttacctgtgagaagatagaagagatggatgaagggatagattcaccacatgaaccacaagcttttactttatgaaacaatactctaaggcatggttatggaagcttaatgagcatagggatctttgaaagcatttaggcggagtacctaaccaatgctgtaaatcagaaaagacttctcaaaagatgtgagttccaagttgtgaacaaaagggtgagtaggagttactggtgaggacagtattccaggtggaagtaagagtatgtgggaagacctgagaagtaatagagcttgattagctagagagttgaaatgaattaacttgccaaccagagttctaggccagatcaagaaaagttttataaaccatgaaagaagaagattttatcctgaaggctttgctgaagaaccagtcatgggtttaatgtcatggaggacataataagattcacacttgcaaaaagatacctttgatttcaatgtggagaatgaacttgaggggcacaaataaaagccataagagctgttattaagcttttccagtaatcaggggaggtgatggtgacctgaaccagaaaatttggttgtaggaatggaggacactgaataggttcaataaatatgtaaatggaagagttgaccagactcgattgatgggttgtggagaatgaaatgtgggaggttgtagaatagtttccaagttctggtttgggagactgaataaacaatgatatgataaaaagtagaacatgaatttgtggcagaattaagcaagagataatgggttcggttttgggcatattgtaggccctatggatactgaattaatttatgtgattaacagatatttgtggagtactaattacaatgccagaccacgtgggtaaaggttgcaagggtagaggagtgaataaatttatttaaaatctatagtgtagtgggggagataagcaataaatagataataaatacaataaatatagacagtcatgtgccactcaataatgggaatatattctgagaaatacatcattagatgattttgtcattatccgaacatcatatagtgtagttacaaaaacctagatagtatagcctactacacacctaggctatgtggtatagcctattgctcctatttgtaacacaatgatatttgtgtatctaaacatagaaaaggtatagtaaaaatactgtattgtaatcttatgggaacaccattgtatgtgtggtctattgttgaccaaaacgttgttatgaggtgcatgactgtatatgtgatggagaggtacgggattggagatcaggctagcagtcatcaatctgagtagaattttgctaactgcagagtggtgtctttaaagagaaataggagtaaaggaactaaaagtgacttttgttgaagttcaaagtcaacattttagcccccctgaaatgtgtacttggatgtaatgactatgtttggaaagaagaagtcttttctggaattgagggcatcagatgataaagacagtcctgtcaagcttgagagcagggctgtgttcctgtttggtagggccctggtgtacgtattaacagagcatccttaaatgtcaatgttcacaaacacaaatgaagtagataatgatggttagtcaatgacttgtgttagtaaattaaagccttcactattgtctttcaagtcgacaaacatttattgactgcctattatgagcaaggtcctatgctttctgttaggaatgcacaaatgaaaagcatacctccaccacaaattcacgctctggtagcaagatgggcattttataactaattacaatataagtcaaactagaaagtgctaggatggctgtatcaaattttattaatttccattggagaccaaaggaatcagtgaatttttggagaaaagtcaactggttctatgcttcataaagtgtggtaatttatttaaccattcaaatggctaacaatattctaggaggcagtgcacattattcaaaaaatatttttattagaaacctccattggggacataccaattaattctatatgatttgtggctaggcaaattttcctttggggatcagactctgggtccttcacctggtgtttgttgtcactggagattccagcagtctgtctttcaggcatttttcattgaagtgggtatgagtattagtataattggaagcttcagagttccctgaaagttaaaggatagtctggctttaattcgtagccatttctcttttttctttttttaactagttagttcaaattctacccatgcttaaggacatcacacttccaaacaatggccttctcccaagttaggtcaaggcccactgctagatgctattatagtactatgtggccttctttacagcactgatgtcagttgtaactttactctgtgtgtgattgttcaggtcttcattcagtcacttcattcagttaactaatgccagttggctttcaagttaacagagcagaagccatatatctgttaatttttttcattgccccagcttttagcccagtgcttggcactgaaccggtaaacgaactcctgcctgaagtttttgcttccttcttgtgctaactcttgcagggggtgataagtgggagaaggtgggcagggggtagatgatgctggtgaaattaagttgctaaccactccttcatttagtgtcctaaacttatttcactgaagtttcaaaatatgctcctccaccattctgttagggaacaagcctggatcaagttattcagataatttataattgtgtaaattgtagtcaacttcctcattcaacatttgcctttccaagctgaagaggctaacatttcaatatgcctcaaatagcagcactctaccccccatgttagttgctatttcctttgttgcttgtggtttctctggcttcatgttattatttgagacgtggtgactataatctcatgtggcattcaaagagtatatacattggaaatttatacaatgctaatctcactgagtttctaatattctgctgcatacatttacattttcttcatgttttaacccaaaagacaattcagtcagtttccttagagaactaacaatgacttccaggtgtgtgtcttccctgcctgaagctgatagctcagagccattcattgtatacctatgctatttatcataaaatatgttagcttgtacttactgagttgaagtctagttattacatttctagtgacttatacaaatggtaagattttcatacctatatattacctttcctcttagctacaaatctgaagctttaatatggaataagtttgagctttctgaacatttataaatgtgttaaatatgattggcttcagtgaagattcacaaataactttggaggcaactacacatttattcttattctgaataaagatgtttcctgatataagtttacccatgataaaactgctttatgatataacactgttctgtggggatttctgtcttcatgttcaagagtaggccgatatgcagccagcatgcaccagtatagccgtgctgatggctttttacagatagtgttcattttgattagttgaagcttcagttctgattgcttgaagccaaaatatattaaatattttgaatatttaaagtgatcaaaaaatcattaaatgacatcagaaccacattagctctttgtttcaagctattgagttttacttctcctagctaggtagaacactaatctataaaataggctgaagtaaaaccacaagtgtaaaatagaggatctggattaccttaaactataatcaagaactaactgtgtttttataggtctgacttcaagtcagtgcatctgaggctgctgggaactgaaagttctttgactcttttaggtaattggaggactttttttttttttttttttttttggtctcagagaaaaggagtagacttgataatgtacttccccttatttccttataaaataacagacttatgatatattcttgccactctggtcaaaatataccaaagttacctgaaaaatctgatgataagtttgatttccctatagggttgggctattgctgcagaacttgtgcttgaggtgggatggttttctatttttcagtatttaattggagtcatgttgacacatgataagaagaagggaatatgtccttagactatcacagaaaccatgaaaacatggtttgtcctcagcattgcacaatatacgtaacaaatctctacaccctgattctaaaataaaagttgaaaaaaagtaaaattgctatgaaaaaaggaagtatgttcatatggaaattccactgttcatttttgaattctataaactattagtacaaagaaattcagcttgaattgacttcaagaaattgagacttagccagttgtttcttggtggttttgcttaattatgtaaaattttcctcaagctagtccctcatgtttcccatggtctgggcaccagttctagaaagaatctgagaatgaagatttcaataggtgtggaaatgtcttggtattttttgtagttattttctagcttgatggctaattggtagggatgttgtagacaaatccttgctcttcaaagtctgatgcatggatcagcaatattgatatcacctgggaattttttttagaaaagtggactttcaggctcctgccctagacagactcagacagactcagttagaactgacattttaatgtaatgcagaggtgactcatgtatacattaaagtctgagaagcttttgtggatatctaattcccatggagtcaagaaggagccctggcaggtctacattacttctattttttatttttcttttctctctttatcccacaagaaagtatctgtaagtactaaatgacttttaaaatcctgtactttaagtttctacattacactatgaagtttcctgccttcaactgtatgttatttggatctttcaacgtacaactagatggaagatgatagatggtaaattcttagtgaaggagactttgaggtgacaatttaattttctttcacttttgtggttcttcatcatatagtgggtactctcatgattcttgacattagttttgattatggcctttagaaaacacaagcgtggatttgaaagccctgtgaggaaaatcttgaacttgagttagcatttttgggacttgaagtcattagcattcacctgctcctaccagtttcataatttaacttgggagataacttataatgtaatctcaaagaaaggaaaagttttctgaattagacatcctggctctgttgacataaaaatataattatacttctacaaaattagtcaacagatttttttctacagtgagagtagttcttcaaatgtttattttatttagctataagcagttcttgttccatatttaaaaaagtcatttacttttgtttttggctctgcaagtagcttcaaaatagggtctcaaaatagaataattttattttgaataaattctttcacaatatcattttaccattattcatacagtaagcaattctgaactatgtgcacacaaatacagtctttgtgggaatactttgaaaagtctttaacaaataatttgaaaatgttcctcttataatgatttttgaagccctttctccttaatttcctcaaatcttttaaatagtctctggtgatttgacaatgcttgctcacatttgttggtggtcataactggaagttggaggtggaatggtgccactggcatctagtgggtagaggccaagaatcatgctaaacggcaatgccaggacatcctccgcaatgaagagtcagcccaaaatgtcaatagcgctgaaactgagaagctctgtattgaatgtactggtgaattggttaatgctcaaaggtgcagttaacagatattcatggagatagaccatttagagacataaaacaattattgactctaaacatgtagatgggtaaatacagttatcaattaatgtcaaaattcagcctataaggtaacgtgagctcaatagagtttgtgtgatgttacatatattataaataagtttgggagtatctgccctcccttttcccctttacctcagcagttgaataggtaccgtcatgagaatactggatatttcaattaataagtttcaaataaaagtggaattaagctaaaaattataaagagtccttgaatggcttgttgattagaaactaatgtaactccttgtctaggataaaataccaaacaggcagcagctgctggtaatttggtgcaagtaattgtacagccaataagttgaagaagtgcttattaaaagaaactgctttcctatctgcttgtaagttcaattgagtaatgcactctacatgtggtctgacattgggtaaattatacacctgatttaaaaacactccatccataagagctcctattttgctcatccataaaatttttactttcttcattactacttgcagcagtgtatggcataatatctatcaaattaggctttgaggacatctcaggctggcaccctgctgacttgaaacatgtgtttaatattactgcagtgcttttaaccccatgagtgccccgggttggcccacagaggcatgcagaatctgttccgctgtctctgtgcagacacattctccacctactgagaatgagaaacatcaaagataaaggggtgggggttggattaaggattactcactgggtaggagaaataagtagttaaaatttgtaggaaataagatagacaaaatgaaaactgtgtagtctactattttgcaatttttaaaaatatgagccagatataaacatttgaaagcaaggcatactatttgacctaataaactctgaaaacaagacccaagaggactttctggataactcacatgaaagccaactttggcatgtgtcttattcacatttataaatatgtggatgactttaattaattttaacaaacatttattgctttctgtctactaagtgccagacactgtgcttgatgctggagacacagtgatgaatgtatatggcccttgccatcttgcagctcaaatcttgtaaaggggtcaggatttcaacaatcaactctaatatagtgagtaaagcataagtgatctcaaggttcaacattcattcattcattcattcattcattcagggcagatggtatctgacacaactactctacttgctggatccccatggcagatattgcactattatagagctagatagacctgtgaatctcagcctgatgccattaagcattcaagtcacgtaattattttcttcttttcttttccatactaacctgccagtcttctgattataatttagcttcccacctggagtgtctatggaaaaaaatggacttaataaagaattctgtgtctgttattattttgtgtgtgtgattaatactacttattttaaattaacagactggtatattgatcataatttagctccgtgtgtatggatacgctatggatagaggtcctttgacatctactttttattgtaagtgaatattttgtcattcttatatattagtcttatgagattggttaatgtgagttaatgtgactttcttcctgaagagatagacccactctcacagtgatgacaagttaagttctggggccagccagacttcagaaactagagtaaagaatagaagctactgaaggattggagaaggtttttaaaaacatatacctggagtgagaaagagaatgagagagataccaacctagatcctgagaagcgtcaggatccaccagtgagaaacagactcagggtcaaccagcaagaaacagaggaatgcattcaagaagaagttggagaaagaagatagcaggaaacaaaggaataaaaggatctaggaaggagctggtagtcagagatacatgagcctgagaaacagaccattggatagggtggttcagaaacctgtcaagagagcagtgttatagagaagctggaaggggtggggaacccaattgcgtaaggtttatggaataagtagctggtacagaaatgggagtgcagagtgtgggtattctttctagaagtttgacaggagaattgcaccttgaagacttgccttctgaaagagagaacctcaatatgtacaaaaggcaatgcacaggtgcataaagagaagataaatgatgacacaaacttctaggtaagacattcatatgtcttcatttttcattaattcctttattcaagtagcgagaacatagtttagtggtcaggcacatggatgctgcagccaaatggcctggatttggatcccagtttcactattatgactttgggcaaattgacctctgcacttgcctcagagggttgttggaagaattaaataatatgcataaagcatctggaactgtacctgatgtaaacatgtatacatatttgataaataataaaggatttagtctggacaagggttaagaaacatgatactctaggaatctatgatgaacttttttttctatgttttatgaacttcttacaaggtgtatttgagatctaaaattaccgagagcctgcagagaatgaaattgctatagatgtcagcacaaaatgtcctaacaatcttattcataggtataagtaggtaaaattgtagaactctgtcaaagagttaaaagaatttcctgatgaaattgcagactaatttctatgatgtttttgtggaatttgccagatattactcaaagttcctttcagaatacccatacaacctttatcttcctatcttctttgaatttaacctgccctttctactctgtctcctttactgtagatattatttagagctcagggaagtaggtccctaaaatctttccaagttttcttcttattttattccttgtattttttctcggttgatatcagctcagagagtattgggttaatttaataaatgcatcagatggctctttccttgggcatctcagctgatgtgaattaattgcttattaattggttgagaatattctatgaataagaaaaggtagttgaataatctactaaactctcctttctttcctttcctcttagacatattatttcaattcaggattataagcattgtttatggtgactagtgaccctctatttttattttttaatttattttatttttttgagctaagtggcttttttattagagaaatccagaattgcaaaggacttaagagttggattggggaccttcttcttgccaaaggtgggcacaacattgacaatgcgctggttgtactgaatccaccacttaaccctgcctgtcatcatcttcttcttctttttcttttcctcctccttctcctcctccaccttcttcctcttcttcttcttcctcttcctcctcctcctcctcttcttctttttcttcctcttcttctttttcttcctcttcttcctcttcctcttcttcttccttctccccctcctcctcttcctccatttggccaccgtgagagtctgacctctcactttcccagaatgggccagagaaacatggactttccctctaagcatgtggatggctacttccagggtaatcagggcctccacactgtacttgcccagggtagtctcatcctctaggggtgtgcttgccaggagcacaggttgatcttcccaggcagtgcccttcagtgaggctacatgtgccttgatttgggcagctgcctcctggccagtcacctcaagggtgtgtagctcctgggcgcggacaaagagctgcatgaaccatgctccccactgttgctaccacaaagacagagttgagaaagaggacccactatttttgaagcttaatgtaagaaaatagatacatgggaaattattggaagcttttactttccacaaaagcaagtgatggttttgctcagagcagcaacacaatgacctgttgctaatcttggcttatttttctctctccttgtgaaggagagaggaaatgctagtacatattatttaattttaaaatgcatattgaaaaagaattctgatggctgcctttcagagcaaactaatagataactgttctcatcacatctgtattgagattgcctctaaggctgtggtaaaagatgttgagtgggctcttcctagggttcatctctttataaaaaaatttttaaatttgtttaaaaagctttttttgggtacatagtaggtgtatatattcatggggtacatgagatattttgatacaggcatgcaatgtgaaataagcatctcatggagaatggagtatccatctcctcaagcatttatcctttgagttacaaacaatcctcaggttcgtctcaatgggttatttgagaacttggagctgggagtgttctgtggtattcttttgattggaaatgggagctgaatgggctgtccagtgggcagagggcaggaaattgaaaatggaaagagaaagtttcagatggctgcgaacaattcttgaaaattctaggtttgaaggtgctgccctggtgatcccgaggatgtggttctcaggctcattgtatcctagctctgtgatttggtccaaatcacttaacttcccttcagcaacctgtttagcctccctgtgcctcagtttcctcatctgtaaactgcaaatgttggtgctcatcttatgtccctacactgggttatagtgcgatttgaatgaaagaactttgtgtaccacgtagaacaacacagttctcactatgattaggattaatcttaatattattgtaggtagttaagttagaacaatagataaagaagttaaactttacctaagagtagaactggccttagttacctgactgaatacatttcaaaagttttatcaccccttattttaaataaattgaatagtacagagagatggactgggaagaaagcaggacctagaggtgacagagtcaaaccttattgcctgacccatgtagacacttaagacatgcagcttggccgggcgcggtggctcacgcctgtaatcccagcactttgggaggccgaggcgggtggatcatgaggtcaggagatcgagaccatcctggctaacaaggtgaaaccccgtctctactaaaaatacaaaaaaaaaaaattagccgggcgcggtggcgggcgcctgtagtcccagctactcgggaggctgaggcaggagaatggcgtgaacccgggaagcagagcttgcagtgagccgagattgcgccactgcactccagcctgggcgacagagtgagactccgtctcaaaaaaaaaaaaaaaaaaaaaaaaaaaaagacatgcagcttacatgaatgagccatagagatatctaaattatttgaaatttctgcattacactttttaatttctttctaagtttgatacaagaagaatatatttgttttaaaatgaagagcatcattatttaaaagaaaatacaacaaccaaaataaaccatagataatcagagtgccacagacagctgatgtggcagcagataataggggaggaaacctggggagggatagaaagagctcaaattcattgggcgcttatgttctagacactgtgataagtgctttctacacctggttgtatttagtcctcttgacaagtctaaagggtagatgctggtagtatcccattttatagattaggaaactaggacataagagagaccaagtgatttcccatcttaatgctagttggtggccaagtaaggattcaaacctggttggtatggctttaaaaatctgtgcatttcatgtatgtttattgcagcactatttacaacagcaagggcatggagccaacccaaatgcccatcagtgatagactggataaagaaaatgtggtacatatacactatggaatactatacagccataaaaagaatgagattatatcctttttagggacatttaaaaatttgtgcatttcatgtatgtttattgcagcaccatttacaatagcaaagacatggagccaacccaaatgcccatcagtgatacactggataaagaaaatgtggtacacatacactatggaatactatgcaggcataaaaagaatgagattatatcctttgtagggacatggaggaagctggaagccatcatcctcagtgaactaacacaggaacagaaaaccaaataccacatgttctcacttataagtgggagttgaggaacgaggacacatggacactggaggggaacaacacacaccggggccagtgtggggatggggagcgaggggaaggagagcattaggacaaatagctaatgcatgtggggctttaaaacctagatgatgggttgataggtgcagcaaaccaccatggcacatgtgtacctgtgtagcaaacctacaggttctttatttgtatcccggaacttaaagtaaaatttaaaaaaaaaataataaaaatattaaaattaaaaaagtctttgcatttaatactgagctagattaatctccaagatcatgtggacaacttcccatcttggaagtaactatcaggaacttctgctctaagtttgttcaagcaagtccagaaccagtttaaaacagtctactatatttaactcacttattaattaacaaactgtgccttgagccccaatacatcttcatttcctctatgctacatcctgtatgccaggtaaacttgctaagttattcaacaatctgatgcttctaggctttccccggctagaagtgtgcctctgatctctttccctagaattccaaaaggaccaaattttgcttgcctctttcggtgcctgtgtcattgtccccaactcaggggcaaactgtaaacttataccattaagagacgcccctttaagaagaagaatgcatgattataaatttaatatgaaataaacatcaatatttacttaaaatataaatgataatagattacaatttttttaagctgacaaatatttcaccactttttattgttaaatctctctcaggatcttggaaatggcccatgcaagtgagaatccctgaactgcaagtgttaccacctttgtcccagctccttcctcctcacagctactggtcattattaaaacacaaccttggccaactaccccagttctaaaggaaagagtagttataaaaggcatttctttggcctcatgcatacgataaagttggaaattaataattaaaaaataatctagaccaggcgcggtggctcacgcctgtagtcccagcagtttgggaggccgaggcgggcagatcacgaggtcaggagatcgagaccatcctggctaacatggtgaaaccccatctctactttaaaaataaaaaaagaaataataaaaaaataattagccaggtgtggtggcgggcgcctgtagtcccagctacttgggaggctgaggcaggagaatggcatgaacctgagaggtggagtttgcaatgaaccgagatcgtgccactgcactccagcctgggcgacggagcaagactctgtctcataaaaataataataataataataataaacaaacatgaacaaaagctagtcacagtacagcttgaaaagatggatttgaaatcagataaaccagaaagtaagggcaaggccagtagcaggtgtaatgctataggcttaccggtacattgtgtacattagcagagggtcttttaaagagagagcgtaaaatgccccagaaaccatgtgagcattaaagttggatccctgtgtgttagtagagccagaggaattactatgtagtgaagaccatttctaggcatttctttattttgtcttaactctacctgaattaagttcttcatctttccactgcccttgtgctccatgttatcctataatcctcgagattatcctcccagtggcctctcaggaggttgaacttgcccagacaatgagagaaagtagttcagatctcaacaatacacaggggaaatcaaagttctcttccatattctgtccattttttaataggaaaacattcaacattgttagaaatgcctgggtcaagtagggccataggttgaaggctcagaaattagactaaatgagcttaggctgctgccaacagcaataatacaataacacttaaatttggcataatagtttgctgatacaagatcttttaatatgttattttattaataccacagacaactttgggaggtagggattttagtccaattttattaataataataacatatttcttgagcccttactatgtactatgtgttgtatttggccctttagcaggaatatctcattccatctatataatatatgatatattataatagccccatgaagttggagttttattcattagtgacactaggaagtaaaagcccaaaaaacaaagtaaccatccacagtcacgaagcttaatgggagggactggaatctgcatccaggagggcattcttaccctcagtttgtattgtcagtgacctgtctcaggccgtaccgctggtgataaaggatggagctatctccaaaactcaaggtttttacattaagtcagcttagtgaagccaaaaacaaacaaatcatgtgtagtgggaatagaggaaaaaacctggaggaaatggcttgaattctagcctcttgtagttgtgtgaccctgggttctttctaagtcacactttttctttatttggaatgggtataagaattccttctccagctaccccatcagggatttgcaaagctcaaatgcagtgaaaatcctttgtaaagtaaacttctcatcacagtttgaagtgcttgttcttaagtgaaaatttagtgttttagtatcattttagaatagcattaaaggcatggggaatgtttgaattcttcctttatttatattgctagtcatactgtatgctgtcttacatactaacccaaagatcagtgagtaaacttcacatatgaacgaataaaaataatccattctacttgtgacattcattttataaaaagagtacctcttcatagaccttcttaaatcacagttgtgaaagtatcatagaatgcaggaaattaattattggaagtaggcactaaaatgatacagcatctaagaatatcagataaagagcacagaagagatttaaaatgcttttcataaaggctttactttatatttagctaaataatatatggaaaaattggcacctttcagcaccagagcaattactactactgttactgcaaaagttgatgcttggccaacacctgcagtggaattgaattaatggaattgatttgcagcctcattaaaaaaaaatacaaaacaaaacatgaagttgtttttcgggaaaaaaatagatttgcacttggtttctaaaaatgtttaggtgactacaagttacctatttgtaattataatacactttctgctattgaggacacttttctacaatgggtcaaggcatttcacacttgcacagaacaacacagtgataaaagcaaagctggggggcaatttctagataaaccatttaattagtgactgctacatgtcagctgtgtgctacactttacatatgttgactcatttaatttctcaaacaacaaggtagatattactattatttaatgtttgcatatagaaaactgaggcttagaggggataacttgtccaaagtagttactaagtatggacctgtactagaactcagagatgcccaaagccttgtttttcctcctcattatgtcatgaaatagtgtcatgacttccttaagaatggatggcactcttgactccctgccctttcaccactgtgatttgactcagttttgctgttcagcaacttatctgattcagagtctctgattcttaaggagaacccttggttccttctactaacttcaaccttatttttgtggatagattgttaaaaaaaaaactggaaaaaattgaaataacaagcagttaaaagctatatactctcctttttagaacagtagtcataggaatttttcatattaccagctccattgtccccagggtaatattgttactaaatttaaaaagtgaaatcatgtacttcataatatctttatgttttatctgcattctattcatttagtttatttacaatggaaccaaaccaaagtcaatgagatacaataataattattgtttatatatgtatgttttatttttttatttttatttttattgtttattttttgagacaggagtcttgctctgtcgccgaggctggagtgcagtggcgtgatctcggctcactgcaacctctgcctcccggttcacgccattctcttgcctcagcctcccaagagctgggactacaggcgcccgccgccatgcccagctaactttttatatttttaggggagacggggtttcaccgtgttagctaggatggtctcgatctcctgacctcgtgatccacctgcctcagcctcccaaagtgctgggattacaggtgtgagccaccccgcccggcatatgtatgttttagatagactgatagaataagtatataggctttagctgggattagtgtgaaaattttatatagctaagttcagggagcgttatttattgaacctgactctaaagtccaaatttctacctgcaaagcaattcagtctggaattgtatgtataaatagcagcaatagcagtagcagcagctaacatttaagcagcaatctgcatatcacacccagtgatcagtgctttatttactcaatttcattctcatcctcaccttgtagataattgaacttagtgagttaagaactctggcaaagtctcaccaagcctgatccatattcatttccagatctggctggcttaggagcctggacccttagcttctgcaccatgctgtcctcagggaccagccaccaaatattggcatatgaactacatagactttctttgggttctctcccacttgtctgctccaaatagcctcagagaaggttcttaaagaaaaatttccccctgctactattttttttattctttatttttactaagaagcagtcaaatctgttggggctcatcattgccatcaactctgcaccagggtttggtgtaaaggtgtgttactgaaatgccacctgcatgtgtttagaatagtgtcgacccagattgagcttcctgggaacacctgctaatagcctgcagtgccaatggctttttcattgggttgcaaaggcagtaacttgctgtgagttgggtaatttttccttctaaccctgcagaaaagggcaggacatctgtagaaaatataccaatttctttgatacatccaaagtacttgttcaatcttactaaaattgaatgagagaactgtgtatgcattaatatatttctgtatatgacagacaaaaaatgtttgatgctggcttcttcctgattgcacaaaatttgtgattattttatgctgccaaattggtgaaattaaatggttttattttgcaaaactttgcaatcacttgtgcaaaatggaaagaaaaaacttgaaaaacaaacaaaaccctagacatatacaagggtatcaaactattagaaaatttaaaagccaacaacttgagttattttgatgccaaccaatggaataaaagttttatatgtttatgtgactgaatagttgttttgttctggctccagattcagcttttgaagtcgtaaagtaagtgtcttgcagattcatggaaacttttgtttccctgagccttacagcagtgtgctctgtaggaggactgggcacagaacacccaaagtaggatgtgcctcagcagagccaaagaactggtttctgccaggcttggagagagcagctgggtcctctagtgtagactctgcaggaagggacctagctagcaaagccgtacacttgagttctaattatagctgtgccaatatctagttctgtgctccagcgaaaatcacttaattctctgactctcaccctcaccatctctcaaatgagagggttgcacagaaggacgcctaaggtcattctaacttgaacagtctgagaaccctcattctcaccattcctctgttgaagacttatgtgaaggtctgaggtctagtttgtgaaggtctgtgaagcctttgtaaaagtttcaacttagaaaataactaattttacatgttgactgaataaaaccccttttgcatttttccagaaaggaatctgattcccatggggttactctgctttcctgccttactgccttctcccttccccttccccttcccctcccttcccttcccttcccttcgctttcttttttgagatggagtcttgttctgttgctcaggctggagtacaatggcacaatctcagcccactgcaacctccacctactgggttcaagtgattcttgtgccccagcctcctgggtagctgggactacaggcgtgcaccaccacgcctggctaatttttgtatttttagtagagatggggcttcatcatgttggccaggctaatcactatttattttttcattaaaaggatgcactattctgttctccagtatcatgtcacacctcgaaagaaacatgtgactttgtggatgaattatagactttaaattgcaaaggcagccacatcaatatatccatctaggcgtataccatattatcaaatatgtaaaatggaagacattggataaaatgcttattgctatgaatgagaaacttagcttctttggttatggaaaaaagtaacaaaagacaggaatcagtaaggtctggcattgcggtttgttttgtttttccctaaataactagactaccgtttgacactaagacatctacagaagcattgcataagctttttactttgactgtaaatttacatctttataccattttccatattacactgaagtcttgccttccatatagcttctgaattgttgcctgcccctcatgtttgatatgtaaatgcagtgtttcttatggaaggactttaaataatatatatacctctgcctgtttgtatgtttagaaatatggaattctgtaatatgtaatatgtaagtgacttttaggcacatacacatggcctcttttatgtgtcaactttttgactgatgaaaaacttaactctattgagtccagagcaattccctttgagtaaaacctcacaaaaagtttggaaaaaaaaattgctccttgacaaatatttttcagggacaatagctacttttctggttgtgaaaggcaagctgaaaccacacttacatgacaaaacagtgggccaccagagcaacattttatactcagaaagaaatgcaaatctaaacagagaacttactttttaaaaataaaggcaagagggtttttttgttttgctttgcttttattttgcggtatgtttttgtttttgtttttaatataaaaagcccctttccacagtaaaagctttttttttcacccccaagaggtttagaactgtatacagatagttacatacacgggcatctcaaatgagagggcagcatacatacatgtaattggttgcttttttctttccctcggcagtctgtaaaaaatgtgaaaatgctcctgcttctgcctagccattaaaaggcagtggctgcaccatactgtgatttgggagctgaagaaaatggccagaactgactgatatctgataaacagtaacaggagtcagtttattgcaccaatcgttaaataatggtgctgattataaggctgctaactgcagatgctgtaattgtctgtcataaatcttagtcatttgtgacaggagcacaatgaaagggagcatctgcttgagggcaaatgacttctgataaatatcagctctacgaaaatgtacttggatgtgtctcaatattttggagagccattcatgttgcttccacaaatgtgaagttattattggtttgtattgattttgccacctttttttttttaaagagacagagagtgactcaaggttgagttgaatagcatctcagctctttatctgatctactcatttctctcaaatgcatgtttgagtgaaaaaaaataattgcacttttttcagtagattgctgttcagaaacacagcctgggaaattcaatatgcagcatataaaaaaataacaaaagccaacatttgttgaagggggagggaacacatttggatttttacaaaggttatttttcagaaaagattttaagtcttaaaatgccaatctctaatgaattttaattgcatgaaaatgaattttatgttctattatgcctatagaaaaatagctaacattatcatattcattataaaaattgctcaaataatagaaactatacaacaaggacttttgtaagttaaaaaaacttggaaaaagtttgtattacataaaaccaatacccacattttaaaaacagctgctttttcctaaaacatttatttcatttagttgctgcatccaggacagcttagaaatataaagcaaataaaatgaggaaattcaatattgtgttgggctcaaacttaaaaatatgatttgaggataagagttattattagtaaatgcaggttacatctgtttatagctgtttgcatttaccagagatgtggggctcttcacaaatctttccatgtgaagaatgtaaatgttttttagtttgttccatgcaattcctgaatttgagagtccagctgagtggtccaggagtggcttaggttttgggtctgaggagaagtgacgacataccacaaaaggagagatggtactcagagagggaatcaaagtacaactttcatgtaagctgcctggagtcttttcttctgaactgctctgcttctatttataactcagtgcctcaggctgaaatacccggataaagttgtccatacatccacagaacaaagactccagagactgtcacagtgacactattaactgttttaccatcttattcacaaggggatttagatatattttttctgaaaggtcgactcagatttttccttgtgtccttggccataaaaggacttgagcttattggacttcctaatgactctaataattatagatacccagagcttcatggtaacagcacccagggtgtgggacaactttagttaaagattcctttaaaacaacatccctctggtattattgtactaaatttcctgggagaatatctgaaacagagtgctctatactgaccctaagttttagaaaggcaaattttggcaagaaaggtagttttgattgatataattaagaaatagaaaaacaagtcctaaatcttaactgtgtataaagatatggaagaagggagatatacagaaaaacagtgtatttgggagtcaggccaaactggatttgattcctagctctacgaaacaagttcttaacctcatctttcatttttacaaattcactatttctgttaatactagggttgtcagtaagaagtcctatctataaatcatttgatacaatgcttgacacaaaggagacatgcaatagttatagctattgttggttatgtaattaatattgtgtatttattgactcatattacatattaataacaataacaaaatttgcatgcttgtctgagtttgcatttgcatatgattttaattcccctgattataatattgtgatttatcttcttctggaaagaaactgctaggaaacttagataaattgcgagtttctatttctatgggtatatttccatgagtaggtagaaataaagcaaatacgtgttaaatacctaagtcctgtcttctggaggttggaactgataaaaggggtgcaagggaagaacactctaacattcatccctgctttcacagagcttattgtattgttaggtagaaagaattggcagttgataatgtattaattttctcatgtgtgttaatgagtgagtgtagggcaacagaaggtcagaaggccagagtcatcagtgaagggacctgagctaagctaggctttatagccaaatgtgatttgggtaagtccagtcacctgatttcagtggggccaacagcatgagcagaggcatgagtatgacacatgacatatggaaaacataacatattcgaaagttaactgaaataaagcatagagtatatgttggggcataatgggaaataaatgaagttgaattggtggtggtaggtgaggtcctagtagtagtgttattatttttgttatccttaatagctagcactattaactcaactatgtgacagatattaaactaagttctttcatgcataacttcaattaagcccaacagcaagcccaaaagatagtaatattattattcccattatttgggtaaaacagttaaagcttagtaaatttaagcaagagtcagtattgtgtgatggtcaagagtataaacactgtgaccagactgcctgggtttgaatcttggcttactaattactacctgtgtgaagttgggcaattgctcatctttttttgctcatcctgtgtatctgtttcttcaccagtaaaatagggataataatgatacctagctcatagggttattgtgtggatccaattagttaagtttatgtgtgtgtgtgtgtgtgcacgtgtgtgtaggtatatatgtatgtacatatatacatacatatatacacacacataaatttaactaattatgcgtatgtatatatgcatgtaggtatatattatgtacacacaaacttaactgtgtatgtatatatacatatatgcacatatacatatatacacacatacaaacacacacacataaacttaactatttggatccacacaataaccctattttatatgtgtatatttatacatatatacatatgtatgtatgtgtgtgtgtatatatcttctttagaatactgctaactatatagtcaagtgtgatataagtgtttgctcttattaagtaggtaacacatagatagcaattttgtaaaagacacagaaaatctttctatgacttttttatgttgactgtccatttaagctgagagaataacatacataaataatttatattcactttcaaaaaagtagaatatacagataaaaatttaaaatgttttatttctcatatataatcattatattgctatatgatttttcagaatatgtatttataaacatatatatatgtcttataacctcattttccactttaaaatatctagaaacattatgtcaataaatacagctaccttataattgtaaaggtcacataataatctgatatgtggatgtagcatacaaaattaaaccaattgcctacctttatagatggtgttcaatttctttttgctattttaaacattctgcaatgaataatcccatagattattggaatatctcatagatttatggaattatttacttaggataactcctagaagtgtaaattctgagacaaagttatgcccatttttcagagatattatatatttacatattgccaaattacccttcagaaatttttaacattttgcagttctgtcagcaatgtatgagaactgtcatctcccatccctcactcagatcacacagtggttattgctcttttaaaaactattttcaaatctaatacgtgaaatgccttatcatcatttgaaatcacttaatattactattacttcaaatatgcttattgaaaatttatatttttataaattttctgttatttttctcctatttttaaaagtttgaggtgttttatttgaagtaaatttccataattatgatagtaaaattttgtctcacacattttgaaaatatatgtgtgagtatactttgctaaaagtttgaaaaggggaggagtaaatgagtttggaaccatgtggaagttaataaggatactttttctaacattcaaatcttagtgttttagttcattttgtgttgccacaatagaatacctaagactgagtaattttgaaagaacagagatttatttctcacagttctggaggctgggaagtccaagactgaggggctgcatctggtaatggccttcctactgcagtaatcccatgaaaacagtggaagggtaagacagcatgtgagagagggcaaaggagaccaaactcatccttctaccaggaccccactctgttgataacttacccactccctagataacagcattaatccattcataaggtcagagcccttttgacctagtcacctcttaaaggtcccacctctcaatactgttgcattggggatgaagtttccaacacataaactttgggggcacattcaaatcatagcactgagaatgttctatatttaaaaaaaaaaaaaaaaaaaacctttggtagcttccctttgcaatagaataaagtcgaggttttaaaacttggcatatgaagtccaccaggacctggtatcagttggcctttatagcctcttccataaacactttctcattgtgagggccaattgtgtgcatctcttcccaagtccacattctgtgaagtcatgttggtggattgagatcagacatagcaggaatatttataccatggaaattggcaaacactatgaattaggactttttctttttccctggagactcaattgttaaatatttagcagcattttactgcatgtactctaaactccaggcatcctaaatttcttaacattcctcatctagggcagtaataaaacatgtatgcaccccagtcagggtaatatatcagttgcccatcaacactcattagcaatgtctaggagaagcgggaaagcgggtcctctagtggcagtgctcagcctctcttgctctgactaacccagggctggcccaaagttgcccattcgatgcagtcacacaaagccccgttttggaaatatgtcacattgaaaacatcatccagtgtgcacaatgactggaagaaaatgaccactgatgagaggactagtcaggatgttgaaattttgtagagtgcatcacctagtcttgaggggctggtgagcccctgcagatgggtggtagtaatgaggatagaaagaaaaagcagacatgagccattttaggcaaggaacagtggaacttggtgaaagatggactaggaaaagaaagagtaggcaaaattaaagctcaagatgtctttaagcttctaatttagaagatgtttagaatagatattggagtcatctgtgtaaagccatggactcaccaggaagagaaccaaaaaggtaaaaaaaaaaaaaaatacaagaaagacagagagaggcagagagagagagagagagaaaaaaaatctgaaagttgagtgctaggaaaatctatgctttgggagagatcaaaaaggggtgtagaggctggacacagtggctctttgggaggctgatgcaggaggatcgcttgagtccaggggttgcagaacagcctaggcaaaacagcgagatcccatctcttccaaaaattaaaaaattagctgggcacagtggcacatgtctgtagttccagctactcagaaggctgaggcaggaggactgcttgaagccaggggtttgaggctgcagtgagctgtgatcatgccactgcactctggcctagacagcagagtaagattctgaaaatggcagtgtctcaaaagctggggaaagagttttaaagagcaaagaatgcttcaaaacatttgaagattagtcaatatactttaaagggaagaaaattgaaagtgtaaaaaggccaagaaaattatcattgactttggcaagaaggtgttcactagtcatagtaaagctggtatcttcagagcagtagaaggtgaaaagtcactgccccacaactcagtggattgtgttcaaattcctgtgctacttactggctgtagttcactttatacaaatgtcttcatcactcccaaagtcaggcttcttcttttattaatcagagatagtttttgttctgctatttcataaggttattgtgagggtcaaaagaatggtatctatggaagtattttgcaaattaagtttttaatgtgacacatttccattattacagtcataatcagcgctagatggaaacaacaggaagaatggttaataaaaaggtaaaggatgagaagaaaaaatggggtgattgggcatcagcttgaagaagaaatggggtatttatttatttagagacggagttttgctcttgtcgcccaggctggagtgcaatggcacaatctcggctcactgcaacttctgcctccccggttcaagcgattctcctgcctcagcctcagtagctgagttgagctcagctcagtagctgtagctgagactacaggctcccaccatcacacctggctaatttttgtatttctagtagagacagggtttcactaggctggccaggctggtctggaactcctgacctcgggtgatccgcccaccttggcctcccaaagtgctgggattataggcgtgagccactgtgcctggcagaaacaaggattaatgaaggatttgtttacatttgtttgaaggcggggatactctgggcatggctgaagatagaaaggaagactttcattgtggaggaggggtgactacaggtgtagagtccaggtaaatgaagagcatgatcattcaactgaaggacagaagcctcttcctctgggactggtgggaagattgagacccacatatagagacaggcacttgtcaaaaggaaaatgggatgaagttgctcttgtgcaacactccaaacatgtgcttgaaggataaggaaaggctgtggaaggacggttagggagagagctatgggatcttgaataagagttagaagacagaagtatggtttcgattactgctgtggtattatcttcttatgtcgtaaactacagtattcagtccctttagaggagttgccaaatctaacattcacgatctccaccctatatagtcactgtacattggctcagtccaggttgcataacatgacctaacaagaaaaggagttatgcttccgcacagctggattggataacaaacacggtcacctcattatctgaactgaaggttggagtacctagttggagatgggattcgtatatattttccagttttgagaagccgtgtgggaggtaaagtctgtacactaaaatgttggattctccaggatcgttctgtggtttataagttgaaagggagggtccgtttgaaaatcaggagtttcttagaaatatggatcatatggtccataaacatctttggtaacttccccctcagatatcatgggacttatattaggatgtgaaagtgcaagatggagatgagatggtcatgagaagatgcctctattctagtgtggtcataattggccggaactgagtggtggctaccttagaaatgacttgccctgtacaggttgccacagttgctaccactcccactgatctgtcagatactgaggctgaggatctgttttcattcagaattacacaggatcccttgcttttcttataataaaaagaaagttctctggttcttgactctatcaaaagtggaaaaaggaaagaatgagaggtttacatgttttaactcttatacacctgactccagtaggcatctgagtttaggaatcatgttataactcaacagttatcaaactcagtgttatgtatgacatggggtatgttgagatcagtcctgaggtatggttagtaagtgtagataaagtaggtattgtgaatattgaacttttgacatactaaaaattgttcaggtcaggtgttgtggctcacgcctataatcctagcactttgggaggctgaggcagactgatggcttgagcccaggagtttgagaccagcctgggcaacatgacaaaaccctgtctctacaaaaagtaccaaaaattagccaggcatggtggcacatgcctatagtcccagctactcaggaggctgaagtgggaggattacctcatcccagggaggtacaggttgcagtgaactgagattgtgccactgcactccagcctgggtgatagagtgagaccttgactcaaaaaaagtgttcaaatttatcttataatatattgtattcatttgtattctatataatttttttttgtgtgagagacagaatctcactctgtcatccaggctggagtgcagtggcactaccttggcccactgcaacctctgcctcccaggttcaagcagttctcctgcctcagcctcccaagtagctgggattacaggtgtgcaccaccatgcccagctaatttttatatttttagtagagacagagtttcaccatattgcccaggctggtcttgaactcctgagctcaatctgcccaccttggcctcccaaaatgctaggattacaggtgtgagccatcatgcccagtcataatttcttttttaaaaccactttactgaggtatgattgacagggaaaaagctttacatatttaatgtatacaatttgatgttctagacatcattatacacctatgaaaccatcactacaatcaatgccatcaatgtatccctcacctccaaaaattccctcctgctctattttgtgtgtgtgtgtgatatgagcacttaggatctcccctctcagcaaagttctaatgtatatgatacagtagtttactatagacactatgctgcacaatagtctcctaggactaacttacttgcataagtgaaaatttatatcctttaatgaagcctccttgttcagcacccatcaccccagcttctggcagccattattctactctgtttctatgagttgtagtatttttccttctgtgtctggcttattccacttagcatatgttctctaggttcattgatgttgtcacaaatggcagaatctccttctttttgaaggttgagtaatattccattgtatgtatataccatatttcctttatccattcatctgttgataacatttggattgctttggctagtgggaataatgctgaaaaccagatatccgataaagggtcaatgtaaaaaaaataaggaacctctataactcaatagcaaaaccatgaatgaccagtataaaaatgggcaaagaaccagaacagacatgtccttaaagaagacatatgaatggttaataggtatatggaaaaatgtctaacatcagcagtcataaaatgcaaattaaaaccgcaatgaaatattatctgacatttgttaggaaaaaaaggaaatataagtgttagcgaatatgtggaacccttgcaaactgtggacagaaatgtagactggtacaactactatggaaaacagtatggagattcttcaaaaattaaaaacagagctcactattgtataatccaacaatttctcttctgggtatatatccccccaaaatttaaattaaaatctcaaagagatatctgatataattaaacatttacaaaaactttgtttttttgaggcagaattttgctcactcccccaggctggagtgcactggaacaatcatagctcactgcaacctcaaattcctgggctgaagtggtcctcccacctcagcctcccaagtagcagggactactggcacttgccaccatgtttggctaatttttgaagttttttgtagagatggggttgcccagtctggtcacgaatgatagctcatgtaaattaagcaggagagaaacatcatgttagagttagcaccatgggaatatccatgagattatgtcacacacatagcttgtcatgtgcgtctcagaggaaaaaacttgagaactactgttctggcagatggcggaacaatgagtgtatagtcattttaggcagcactaaaaaatcacatgatggaacattttctgcagagctgtattttgttctcaatttaatttttatcaaagtcaaacatatacatagtttaaaaagtcaactagtgtaagattcatcatgaaaatcacacatctactgagacctcttccccaccctatttctcctcccccgaggcaacatttaggttgaatgaataattggtgtttacattacaatcacataaattttgttcataattaaatctcaaggtatgttactgtcatgttttgtttcttctaaacttcgcttttttctggacttaatcattgtctcatattttgtttgttaggttttcttccttaaatcatctattagaactacatccctctcaatatgatcaggtatgctagataatatcggtttccattttatcttggagaccaccctcttgaagccttccttccttctgctccaatcaaactagttgctctctaggttgctacataagcatcatcctgggattccccactgccatggttcagtttacttcacttttctcttgggttggatcccatgcctatttattcccctttactctacttgtgatgaattatttcctgggagttttctgagaaaggataaggataagtacttctgattccttacaggactctaaaaaggtctgtagtctaccttcacagttggctaagtgcagacctctgttgtagaagaaataatcactgtttgctgatggcattgctccatgtgctctatctttgaaaattcttgttgagaactatgaagccattttgattgttgctatttcatatatgaccacctttttttggtattgtcttctctatcttcaaagttctaaaatatcacagtcatctgttaatccaagttctttagggtttggaaaaatatttttggctaatttccttctccaaagttttctttttctggaactcttagaataagaaaactcaaagttttcttatttctggtcagcttttaaggttcttagattagttttctacgtttcttatcttttctctcctgtttttccattactttgtcttttgttttacatttgagaagatttttgtcaactctgtcctctaaatatactactgaatttctttaagttttggtgccatattttctaagactcagaagctctttgttgatctgttcttgtttaatggatatattagttttttatgtataattagtaaccagaaaatataccaattgcattgcctctgttttaagaatttgtgtgtttatatctgtctgtctgtttttttcatagagaacttttaaaaatattaggaatctttgactttgtgtcatatttaaaatgtgagggtacaagaaaatataggaagctctgtgtggatgtgtgtgtgtgtgtgtgtgtgtgtgttagggggagaggattctccactgattggattcattggctgtttcattggttaaacccttaaatgtcattatctttaggtgttaaatctcaagctgacatttctctagagagaaattgttcagtatcttgcctggaagtgaaaacctgattaccagattttgaggaatttctcataaagtatttaggctggggattctcaaaatgcagtcttcaaacttcagggggttcctaagattctttcagggattctacagtcaaaactattttcataatagtaccaagatcagaagttatttgcatttttgtggtggtgatatatgcatttatgatgcaaactcaaccacgtgtaaaattgctggtgcttagcgttaaccaatgtagtagcaccaaactctgctagtcattattgtattcttcacaaacatgcatgtaacagttaaagcaaaaaaaaaaagccactttcattaaaatatgtctttagtgaacagtaagagttattgattattatttaaccttgaccctcaaatgcacatcttttttatattttctatgatgaaatgggaagtatgcataaagcacttctgcagcatgccaaagtgcaatgattgtctcgaggaaaagcatttgtgctattgcttgagttacaagtggaactacctgcttttttcaaagaaccccattttggttgaaagaatgattgacaaagaatagtctttcagatgtggctattagacagacagccctcaaaaacgaacaaagtaaccttatcacttcagggaaaacaactgatggtatttgttgccaatgatagaatttgcgtgttcaggagaaaatgagaatcttggaaaacttgtatcctccaccattagcttgaaagtttcctaagtggggttactggtgatagtaaccatgtgatttttcaatattatataataaagtgcacctatatttgaaagatatgcctaaatcaatgaactgctattttccaaatgattagtgcaggatgttaccaaatcatgcatgggaaaaaatgcaagataggtttatgcaataaattttaatgtaatagaatacaaaaagttcactgatgcactttcaaattttgtattgaaactcttctttaagaaactaccactcatcaaattttggtgtagcattgaagaaaaatatttacaactatctgaaaatgttattaaaataatgctctctttctaactacataactctgcaaagctggattttcttggtattcttccaccaaagcaacatattatgatagattgagtgcagaagcagttatgagaacctattttctattaagccagacattaaagagatttgtaaaaatgtaaaagtgccactattctcactaattttttagttgtgaaaaatatagttacatttcagaaaaatgttatttatattaatatataatggacttgctattgttttaaatgaattaagattttttcagttgtaatttgtaataaagtaaatattgatacatataaccaatgtaaacaaaagatctttctcaaaaaatgatcctcaaaattcttaagagtataaagtggtacagagagcaaagtgtttgagagcagctgaaagacaattacttaatcctccccaaccctacgttttctcaatggcttcacacccccactttttactataccagtgtctcctaatttagagagacacttctctgttcaagtctctgactggtggtggggggcctgagagtctaatttttctctgtacagatttccaagcactatgtcctccttgctgcatgcgtccgtgtgcttcctgttgcttctgcccaggcagacatctaggtttcactttcttctttttgccaagccagttaccactcatcacttcgttccaaaattttaataacatctcttggttttctgtcatctcctctcccattcctttatccttgtgggtttataatttttaaaaacctcttttctgttattttagtggagatttgggagggagtggaggtagaggcatgtatttgactgggagtactatgtgttgattttggtatgtgtgccaacatgtggaagctattaattgctacctatttataatacattatttaattttaaaatattaaattaaaaaacaattccataaataaattaaaaatattcaatagaaagaggatagttgaaatatctgttagatgttttcatatagaatatttatattttcctttattatttaattacttagaaacaatcaacaaagtttttggagttctttggggaaatggtcctgtttttaaaaataagcatctataaaatgctgatgtttagcttagaattaactgcattgcccacctaaccaagtatagatcaaaatgacttatgtttactttgggtttaccttatatatagcttttaatatgaaaatagtgatatttgggatttaatactgacccttgcatatttaaatctattgaataacagattacattattattaggttttatataatgtttctaaagtatgttacaatgaatatactgaccaagaaaatttccagggaagagttcaagaatttatgattctatttcatgccacatcatattgattacactctttgaagtcaaggaaatcttagttctatgaactacagcaaaaagtgagaaatagttttcagtgttattcatttcccaaatataagaacacaaggaagatgatcatactagagtctggaattgtttgattttgatgttaatagttatgacactggagactagtaacatgaggcaggttaagtaaattgagattgcattttagaagataaagatcagaattgagaatgaccttataaagttggaaataaagaaacaactcacagaattcagaacatcattgaaaacctggaatgaaccttgaaaataatcttgtccaatactagcatttaatagaggaggaaatgaagatccggaaatgtggagtgaaggtcaaattgctacttattagcaaatgtgttattagaacctgggcttcctgtcctccagcccagtgttctctcccatgtatccacttcatcagagacaaagggggtatcattccctgaagaagaaggaaaggacattgccaagtctgccttccattctcttctctttttatttatttatttatttatttatttatttatttatttatttattattatactttaagttttagggtatttatttatttatttatttatttattccattctcttctctaggtatgtaagtctttccttgatccaaggcccagctaaaacattaactctaacaaagcttcctagctgatttcacctcctctgtcaagtactgtgatcttcatttctcctgtacccctgtcacatctgctgccccatatgatacctcatatttgtggcccttcatggttgtctatctttaaatgtagatattctatctccccagctagatagtggtacttttgagggcaggaccctatcaacagtgactatagccctgtatccctcaaggtgacttggattcaaacatcagaggtgatcagctgctgttgctgttgtattgttggaagatctggctggttatgtacacactgagcaagaaaagttcctcaacatggcaggggagttggtatcattcaagccgcagctcaggaaacaagcatactgtggaaataaataggagaacatcatgtacgaaccagaaaatccaggatttagtttttagctcttttcaagctattttcaggattctgctaagcaatatgttatactttttaaagaacagaggcgagaagctggaaatggtgtttttttttaaaagagcaatattctatggcacatagaaaccatatggctagtcctattttctaaacacagatgacccaaagacaaggctgacatatgtggttgtttagttggttcagtgcatagaggtacctggccaagagacaggaaggaacacttttttcttccttccaagaagaaattctactttagtgcacgtcccagagactgactttgttctacccatatgacatttttcaactattactttatatacacagagtgtacttatgtatatacacacacatatatcttgtatacatatatcttatatgtgagggtgtgtgcctatctgtatctatcatctatacataatctatcttgttcccaaaataaattttaatctaataataataaaaacaataactaacattttactggtcatttcctagacatgttctaagtgcttcacacataatcacatgatttattcctcatagcaatctctctgagtggtggtacagttatgagaatttagtggctgctaaatacatccagagcattaggagagcagcaatagtcagacaccttgcagcctttcacctttagaggggctctcaaaacattctacggctattaacttctaacagcaggtctgaagagtcacatgcccaggggcagaatttaggggccagattttcttagaacctgacaatactcagcaaatgatcttttcctctgctaaattggcttttccttccatttcagtagctttttgataaatatttgttgaatgttaaaatgattgctctccttctagttaattcagatgtgagacatctgacccattcttgggctctctccccttcttcccatctttttcaaattagtcctcaattccttgcagctgcttcctttgtacaaagtcttgaattccttagtacccaatgctatcaataagtttgttctcagcctctcacagtgacattagccaacaaattgtttcttcaatcattgatttcttcagcccattcaatatcacacattaatattggcttcccttatttttttggaatctaatacagacttcagagccctttactctagcttttttctccatgagaggcagagtagtgtttcaaaaaatgagatggtctatgatttctatggactagtctttggattttcctggccatttactatttgtgtagtctagaacaagtcccataatatctgagtttgtttcttcactgcataattatatggttttgaaaaaaattaaaatattatatgtaaagtaataacagcagtgcttgaaacgatatagattctgaataatgagagttatgttggtgaagatggtggttgtagtgataatgaaagacctggatctcgggcttcctacagagcctgcttatctctgacctttattttgttgttctcctgcctggaaggcctccccatccttccctttactttgtttatgtgaatatgtatttgtgaattgtttaagatgagcaacaatatgaccttatttttaatatattatgtttggagatttaatataagtacatgtatatatacatgtacagagttcaaaaagtatatgtgaaaagacaagtttcccttctggcccacagttcccctctccagaggcaaccactgtaatgatttattaaaggtaaatatttcatttacatcttgctttaatttttaagtaaaatgcatcttagagattgtttcaaatcggtacatcttcttcatctctttgacatgctttatttttattttgctcttcacttttaaagagcttagagttagttggaagacttatcctcatagtcatcattttaatttctaggaggatgatattattggctcaaatttataaagtatttatagcaataattatatcatgataatattttagtctgtcttaggaatttattaatctaaagaaatatttttaaatttctggttaaagaggctgaaatgtaaccttttagttaaaaattgcaggacatatagaaaattggtttcagttaaaacaatacctgactttattgccctggaggggcaagtgtatatattactcacgtctgcgtctctagtctctagcaggctgctcaatatttaggaggaattcggcaaatgtccaatgaatttaaaaatgtgtgaataaacagattaatgaggtgcacaccagggcactttgcgcctaggtttatgaaatggttatgtgcagaaaatattatatacccaaaagtcattagtttacagcatcctaataaaggagaagtaatttgcggcaataaataatcctgtacatatatgcagaaaagaaaaagcatcctttggacttaggctaatctgcatctttcataaaactcaacttcagttgatttggtataagttctgatgcaaatgactgtcataagtactcgtgaatgcaatgaaagtaacaagtattaaggtgctgagtagtggaccctgttataatcaagctgatatgggaaagaaaaaaaaagctaaatgttaaggtttacatttgtctttaaggcttctgatgtatttgtaaactatgttaacattgtctagataagccatgcttggttgtacctagagcatttggttagagaatattttcaagacctactgcagtcagatgaaccattgcaaatttttgcccaaatttgtactattttaataaacgcttaaaattaatgtgctttaaaaatatgaggaaagtaaaaaagcactttgttgcaaagtatagcttcaagtgtctcaataagttagaagagaaagtgatctaagcagctggcaatacagagtctgaaaatatacctttgctatgaatacaaagaacaacatagtccaataggtaaacaaacatatgaaagatatttctttttcctgtcaaaatcttgtaaaaataagcaaaactgagactctggcttattcctacttaattaccaaaaataaattgaaaagtaatacccaatagggatgaatttgtggtttaattagtgaacttgaatattgctgatagcaccatcatatggtattgccccattgaaaaccaatgtagaaatgcattaaaagccataaaaatctttaaatcttttatttcattcatccaagttaattttattttataactaattattatattaataattaaaattttatttatttcaagttagttgttccaataatggaaatatttatttatatattaagaacaaccttacctgtgataagacaaaaacataaacaaactaaatattcagcatcaaggtttagtgcaggggtccccaactcccggggccatggaccagtggtccgtggcttgttaggaactgggctgcacagcaggaggtgagcggcaggtgagcggcaggtgagtgagcatcacagctgagctctgcgtcctgtcagatcagtggcagcattagattctcataggagtgcaaaccgtattgttaactgctcccacgagggatctaggttgcctgctccttatggggatctaatgcctgatgatctgaggtggagcagtttcatcctgcaaccatccctcattccccccacctcccctgtctgtggcaaaactgtcttacataaaactggtccctgctgccaaaagggttggggaccgctggcttaatgtgtggtctatacgctaaaggtatgttgtttgtctgttaagaatgactataaaggctttgcttcagtatattaaactatttgtaaaataaatgaaaaacacagatattcatgatgactacaaatgtgtaaattatgcacacttaggagtcactagaagaaaataccaaatgaagaaaattattggtataggtgacagagttggtagacaaatattttacctgaaaattgttataattttaagcaataaatattaatagtaatttaaaaaatatcattgacatcatttatgccaatactatttgtgtaaaatgactagcaattgaaatcagactttttcacttagcttatgctgtttacctgagatcaacctagaacaatcccatcgtaaatggcaaatcattttctgaaacagtgctccagagaattggacactgggtgaatgagattttattttatgtttatttcccttagagtttgaagtgagaattagaaggtggctccttggtaatatctagtgcaatcccttcccctcacccccacttgctacagggacctgtctcttatgtcaccaatctgactggtgtccctattagaaaaggagatttggacacacaaaatgaccccagggatgcacacacacagaaggaaaaccatgtgagaacacagagaagacagccatctgtaaacaaaagaagacaacttagaaaaaactcttttctgccagcacctgaatcttagccctctagccttcagaactgtaagaaaataaatttctgttttttatgctactcagtctgtggtattttgtcatgtcagtcctagcaaactaatgtgggtggttttctggccgttggttaagctttcttcaatgacagacaactcgtgacctgccaaggccacccgattttatattaggttgacatcaattattttacagatctttctaatattaagctaaaattttcctccacgaaacttctcaatgaacctaattctggcttccagaagcatgaaataaatctcatcttccaatgatatttcccaagtgtcttccctatgaagactgtgttttcttggaatatcctccacccccaattcctgtcactgtcctcatttgctgtatttttaagccctctttttatgatgatcatgttcttttcagtcttataagcatctgtttgaaggacattttgaaagcatttccaggtggaatattttgatcactagtgtgccaaacaggcctatttcttttggggagattaaaatttatggtgagagagggaaccagcagtttgtataacccttttttgcttagacatgtaaaacagaggactgatcatacatgtaaagtagaaacatggagaataagcaccacgactccttacaaccaggcaaaaactgtcattctttgtgcttatagacagaaatctacttttttgtatcctatgtaatgttaatttaagttctgtttaaagacaatttaaaatatttggtgattgagttaattttaaaaccaatcttaataaatatatataaataaatctaattttagaagtagttctaataaccataatattaacttaactcttgttatttttgaggattatttattcatcaaatatttattgagtacctattatgtgaaagggttagatcaggaaaaaatgtagaaaccacctatatccatgtgaatggtcaaaaattcagccaaatttttgagcatgttgcatttataatgtttgcctctcctttaacaaatgctaatacaactgtgtattttaaaattagccccacttttttttctttttttgagatggagtttcactcgttgcccaggctggggtgcagtggcgcgatctcagcttactgcaacctatgcctcctgggttcaagtgattctcctgcctcagcctcccaagtagctgggattacaggcatgcaccaccacagctggctaattttgtatttttagcagagacaaggtttcaccatgttggtcaggctggtctcgaactcctgacctcaagtgatccacccaccttggactcccaaagtgctgggagtacaggcgtgagccactgcgcctggctagccccacttttatctatcctctttattaccttatccttccagccagctgaaggatcaacagttgttagtgatcctggctggtgaaatatcaatttccatggcctcactgcagtatataatttttagattgcaatctcaaagacactcagaataagtttcctgaaacttagaaaatttatacacacaagacacaatttaaaaacaacaacaaactctctaagtgatgtgtccttctcctttagctcatatctaatggccagtctattggattgtgcagtgtcatagagtttaactctgcgaaataacagagagatctttgtcaacctctcctgagtcactctcagaatgtgaatcaagttttaatctgagtgttcatgaagaagtgcatgctactagttggtaaaagcatttgaagttttctttatttctcaagttctcctatgaatgaataaatattgccttgacaataacttcataatcccaatgatgagctcaagtagtctagggctttgctactccaagtgtgcttgtataccagtagcatctcattacctgggggtttgttagaaatgcagaatctcaggccccaccccagacttactgaatctgaatgagcatttagcaaaatcccaggtgattcatgtgcacaatgaagtttgagaagcactggtttagaggcgcagtttccaaaattttccggggaaacagccatactcatcatctgtcagatgcctcatgaactactagcttgagttaagttcgcagtttcaacactaaatcatactacatttcatttgatgatgtcacatctctgcaaagctgtggttttgccagtttctgtgatgaaagcaattcccatgctaaaaattaataagaacagaaaacgagagtggtgatgtccaatcagactccaagttttaataaggtatataggccaggtgcggtggctcacacctgtaatcccaacactttgggaggctgaggcaggcggatcacttgaggtcagaagttcgagaccagcctagccaacatgatgaaaccttgtctctactaaaaatataaaaattagctgggctcagttgtggtcgcctgtaatctcagctgctcaggaggctgaggcacgagaatcgcttgaacctgggaggcagaggttgcagtgagccaagatcacaccactgcactccagcctgagcaatagagtgagatagattctgtctcaaaaaaaaaaaaagaagttataagttatatagtacccaaaagacccaagcatcccattagtaagtaactgtggttatctaaggataaaaaagaacatttttctttcaacttatatgtatgtttttcttcaaatgactaccaggttgttaggacataaatgctgattaggttgtttggatctcattacttaatagatgaaatttcttttgactaaggggtgctgtgaaaaaaattactgagctattagagtaccatgagctaagaccatttgggaacctctagtctatagcattgtctcaaaaagagcaacataaaggctattacgctgtcaaataactttgggaaatactgcatggctatttatttttgaaggagacaagggagacaggctcaaggcaagtggcctgggactcagaaccattctagaaggggccaggagtacaaagagaaagcaagagagatggccagacatgtgtcccaatgagaattagcgggtagtcctctggtagagtaggcttcatggcacctgtggactcaccccatgctaagaggaggaaaaattcccaaagataagctttctaatatactgtcaactttgattggaatagaccatgaattaggcagtgacctgatcctataaatcaaagacctttagtaactatagcttaggaagtaagcatggatgctttggataattgtaagaagaatgtccccaaaagtaatgacaacagtaatagcaattacagcagagtaataaaaataattatatgaaaatttattatgttctagctactgttttaagtgctgtatttatattaacttatttattatcctaaaattcattcacttaataaacatttattaaatgcctcctgtgtgcaaggtgccatgggcaaaatagataaaacctccttcccttatgaactatattttagtgtaaagaaaaagacaatcattgatacaaaaaatgagtaattaataaattacatcatatattggaaagtgagaaatggtattttaaaaagtagacagggcaaaggaaatctcagtagtgctggggtaggtggggatcagtttgcatttattaaatagagaagccagaactgcttgcagtgagaaggcgggatttaagcagtcttgaaggagaagatgcatgagcaggcagatatctaggggatgagggttccaggctgtgggaactgctagagcaaagacctctgtgtaggagttgcctctgtgttcaggagcaggaagatcttgtggctaatgcttgaagactgtcataaggaactgaacttcactcagaattcaatgtgaagccactgcatgcatttgatcagaagagacacttggttcgaccgtgttttaaatggatcacccaaccacactgataatagatttgtgtggcaggaagactgattaggagacttttgaaataatagtggtggggacaaaggtggccgttgtgaaagtaatgaaaagtggccaaattcttacatttatgttgaagacaaattaagtaacttacccaaagttacaaagttaataaatgacagaattggcgattgaacccaggaagtccagactcaaaaactgctctgacatagagtatggcctgacctataaaaagagatggtgagaactcataagtgggagttgaacaatgagaacacgtgaacacagggaggggagcatcacacactggggcctgtcggggggtggggggctaagggagggatagcattaggagaaatagctaatgtagaagacaggttgatgagtgcagcaaaccaccatgtcacatgtatacctatgtaacaaacctgttctgcacatatgtcccagaacttaaggtattaagaaaaaaaaaaaaaacagagcgatggcgagaagacaggcagagctttctaacaattatgccagtaagagagtgattttcgatggtggggtctaagttgaaaatggaaagccatttgtctgtgataagcaggggagcttcatacatgggagcaaggtgtttaataaaaatgacttttaagccccttctaaccctatgattcccagattccaaatatagaatggcacagtttatactgtttgtcaatagaaattgacaattctaatgattactattttgaaaaccattttcttgccttcatctagtttaccaaggtgtaaccaatgctagatttgtcccctgttctcaaggaaaggatgaaaacttgatgaatctgatgagtctctgaagtgactaaaaataaacccatgaaattgccattttgaatgcaaatttaaaacatttacatatttgcagtgcaaatgccattactaggtagtttggagatataaaatcataaaataatagaggatactcacggattaggatgatgcatgatcattgcataaaacccttcagtactgctatatgggtctggctaattgttcaaacaatcaaggtactataccctgtatgtgtgcattgttggcacaccactggagtgttagactatttgtgtttgtttatgaaaagtacctgactctgtttctggtatagctgtgggttgatatgctaggtggtgatccaaagatacaacttcgcctaaatcgttttaaatgttctttaccataatgtcaaagtgttttggacaaactcctgctaggtgtgatatttcctgctatgagcaatgtatagcaagtctgtaaaacctatcaagtactgctagggcatttggtggggcaggaaatatgacaacctgggaacaatttttgggctacttgtagttgaccaaagagaccagatagatgcatgctgcttggtagaacgggaagagagggaaacaaaatgaggttgaagtagatcctgacaattgacaaagaaatgccagagcctctatgtagaagaaaagctattgaaattcaacctatctctgaaggtggaaagttgtaggttagtatgctttgcctgaatttgagtatatctggagtgctattggttagtcttttcaaagaaggaaaattaagcccaaagagaataaggaaaaaatagacccttttcccccacccacatactacctatagaatggaatctgtgataatgaccctgttggacttgattctgtttttaaaattacaaaaagtaaaactgtttctttctttacactgatgtgtgtgtgtgtgtgcatgtgtgtgtactttcatcatgcaaatattccaagacctaacagagagagccattagttacttgaggcaacttgccagcctactgtagagcataagttcagatcttaatggtgacttcttgtcatttgagactgtttgaataacatatcaaaggaagagaatctcaaataagttgtctaaatttagtaaagaaacctcttctccctggtagttttgctttgtatttcttttggaacaccatagacataataaagagcactaagaatttcaagtctgatactttactttttgaaaagctgtggctttctttcaggttttgtttgatactagcaactgatgtctgaaccatgaaacaaaactgtatcgatcttacctcttgcaatgtataattgtatttccacttggactcttgctgtttagttcttagtgcaattttaatgagttctttttgtttgtcttcttcacacgtaatatgcagccaacgtactgttttagaattttagatcaacttttataattcccaaaaattaattgtagaaaacgtttcactttgtaaatgtgtacatgtagagaactagcaccccctagtgtatttaaagcccccaaaggtgtgatctggcatttaataagctaataacaaacaggaatgtgttccaatagacaggttatttgttaacttttcccactggcattatgacataatttgtttaggcacagggaaagcatttcttaaagttaataaagattataaataaagaatgaatatcgtatttcaaacatggaaactaaaattttaaaaccatcattggcatttgaactgctggtgatatttaaaggctgtgaaataaaatagcaatctgtggtcatgctgctaattttctaaattctctctcttttagaaaatttcagcaacattcttgtttctggaaggctataaaattgaaagtgtttaggatttttcttctgttggtgactgttgtactgtgtgttccttaatgaaactgtaaactgaaaattacagctttattccagagagagagagagaggacttattccaacagatggcatcaaaacaccggtctaaactgtatgatcgctgattgttaattgcatctgtaaaacaatccttttaaacagagtaatacattttatcatacagattatagttccatgctttttggtttttcaatgtgtgttaacattttctgctccaatataagatttgtgcttgtataattatcagattaaacaacagaacaacagtgactcaatcatttttaggaaacatgcacaagggagatagggaaccataaatcacattttatttggacattgtacttgagaaatgttggggtttttatcaggttatataaaaaggaagaatgggctagagctcaccctcatcaaattaaaacggtagaaacctataaaatatcttaaatatatgctaaacatatactgtactttaaaatgtatctcactgtaggaagaaacatgtttcatttacatagatctttgaaatgaaaaggaaatgtaaaagacacataataagaaagaagtgttctctgaaaaattagagattaaggcacacagcttcctttctgaaatggtttccatgaaagcctatgtagaagcagaggaatgggtttgatgacatcgtgaagacagacctttttagtaagatttttccaagatatagacagtattgggcaaatggaatatgaagattagatcttgtgttgcttctgcagcctgggtgattcagagctgggaacctgaaatttagagatgtggaaaggatggttaacattcatgtcatcatgagacagctttttggttcataggtgccacatcagattctcctgtctacatttgatatattaagggtgaataaaattaatggatgtcaaacttctgctatttcaattttttgttccatcctctgggaaaggattatagacaggagggtaccctagcttgttgagctggaaacatatatttaataagtcaaattgtgatgatcccatttctgagttttcaggtatcttcacttgatatataagtaccattaagataatacttggcttaggaaggtccacttatcagacattattaacaatttagattctagatagaaagtctcaaaactgggaacatgaatttaactataaaggatgtccagcagcaaaaagacatatctttaaaagtacacaataaacccttgcctagaatgcacttttttaattttaaaaagaattctaacaaatcattgttttccctgatattgaagcctaaattagaaaggcaagttactagtggtaggcataaggagtgacatctgatgcctcgttctgaaaacagagttggaagaactgtgttaataattcaaataaacatttgctaattacaaagggaaaatagttacttggaatatctcatccaacaccaccttaaccaagtgatcaaggttaacatcatcaggaataagacatatcgcatcatgaaccctctgatatgattaccaaagaaagggcatgaccttccttgtgttgtagcatttcttaccaaaaatgtatgacctcggtataatcattagaaaagtcacaaattgaagaacagtccatgtaataaactgactaggactcatcaagagtgacaggatcatgacagacaaggacagaccaaggatctgtcacagattagaggatgctaaggagacaaaaaatttaactcaatatggggctccgggttggatcctggaacacagatttggcattagtaactggtgaaatctgagtaaagttttcaatctagttagtagtattttgccaatgttaatttcttggttttaaagattatattgtggttaaataagataatagcattaggggaagttgagtgaaggatatatatggagactatacttttttgcaacctttaagtaagtctaaaattgtttctggataatttttttttaatcctacaaaactcaaagtgtatagtagtctgaggccatttaatgtaggagcaaaaggccctgttacatacttgagttgtctaaaataatgattgatatttaatataatgagctcaaggaagaattatttgtaatgttatttgcttaatataagtcagaaagcctgtaatacattttagaagcataatttttaatatgaaaatttggaaactgtaaatgagtaaatttcaattacttgggaaatcgactttttggacaattttatcaccaatgatgctgtataatgaatcattattcttcaataaaaactttcctgcctgtgtcagacctataattctccttcaatcctctacccgaggatagatattttataacttagagtaactgtgcagatatctgatgtaatccaggccttcatttgatactataatctaatgaaatttcaaaattgagcaatgattgaaggaattttatcaacccttgattttggtactgtgtatgaatagggaattcaaataattttcttcaaggcttacctctgatttctgccttataagcaggagttggatattttagtatctacagatcagctagtgttaataaaaccatagccctgagccccaaacctatctacaaatattctcatatttttcaataaagagtggcaatgagaggtttcaccaaagtccatgcaaggtggccatgatcggaacaaagtgtggaaagctccagtgtcttaggcaacttaataagctgtaaaatcatccttttacttagcctgtcatttagcaaataggcctacatttctctaaactataccatcacacttcattagctgaaggaagcttgtaacaagcttgtaacttgttgcgcacctaccatgtattcagtgctgtatgaggtgctgtaggattcagaagtatgctccagttcttctgtatcttagaagaaactctttaaaaccctcatgggagcttataagattaaagaacatatgcaattgcaaatcaaccaaattgtacatacttaaatatttagaccattggtttccaagcttattgagatcaaggactctttttttagtgtcagatattttacaaactctatgtgatagctgataagtgtttagtacttgtaaataggagaatacataatggcaaaagacaagcacaaattattttagattaatgtattttgccacaagtgtctattaacttttggaaaatagtaacaaatacatgcaaggggcatacaacttggtatatgctttggtgcacgtagggatttatagacccatgatttcttcccttgcttgaccccatctcatggatgctggtcctcaggctgtgagccactgtgctggagcataaatgctgttggaattcaactgaagaaggccaggtgatgattgccagagccatcatcagagcccctggatggggcttaaggcatgtgtcagaggtttgagaaggtgggaatatgtccaagggaagccatggaaaagcagaaataaggtaggcaaattgagagggaatgaggagccaaggctggatggggagttagaaaaaaataaaattggttaaacaagaccaagagagattatggagagttttgaaatccaaacacaggagctgcaaatttctattaaggcaaggcactggaccaggactgaaaggactgggctataatcctggtactgccaattactaggcttcagcaagttaaattttggagccttgactgtcattattggtaaaactgggataataatacataccactcaggaaagagagcatctgtgaaattttcttgtgggctttcagtccatttgggttgcatctggaatatctaagggaactatctaagattattgagcagggaatcagcatgatgaaagtaatatattaaagaagattagtttggcagctcttttgcagtttggattagagtcaggaaaaccaatgagaaaactgtcccaatgatccagactcaaagactgtgaaaataaggacaaaaggaagttgagatgaaaatcaattggaattttagtttgataaagtatcaaggatgagatgaatcaaaaatgattttgcggttttagagttagttgctatggaggaatggtggatacaatgaaaaagaaaaggaaaatggagaaaaagctgatttggagaaaaaggatgtgaagtatggccatggtgaatggcatgtgagaaccaacagtcaagtagaaatcaactctaaactcttgggaatatgtaattggagtgaagtgaaatttgtgctggagatggctagagatggcaagtcatgagctgctagagtggcagttgagctgtgaaatggatgtgccacttaatagagattataaacagaaagaaaaaccaaggtcctaggattaagcctgtgtggtactttctcttgagaaactattctaagggcggatcaattcattattctgtaactaatgtaagatgaaattgaattttaatcatcttatggggggttttaacttatgaccattttttttgcttgttttaaaattcatatggaccaaaggtatataaacatgtcatttttttttcttttcaagaggatgtttgattattcatttatagcactgctcttatgatgaggcattaaaaaagactgggtcatttcttcctgaattatggcaggggagcctggcaacatttctgaggctactgcgtggctgagccgctcgtaacaggtatgtgtccagtggggcacatctggcataaatcctttgtgatctgacttctccccagcatcatcgtgcaatatttcccagcttcttccagccgcacagatttgaactccaaatataacaggtctatgctagctctgagctcttgctcatactcttcataagaagtagaaacttggaatgcctttctcttcaagtctccttcttttgaaatttctcaagacctagtcccattgtcctgtcttccctgagactgtttctgattccacagtgggaaagaatctcaccttcacttgtatatgcttccacctctgcacagctctccttccagtctaccttgcattgtcattacttgtttccacacttatctcctccacatgactgcgagttccaaacagcaggtgatgtgtctgactcacccgtgtgcaccccgcacagtgcctagcctagtccctcacttaatgcttgctaaattgagaagagaatgacatttccctgcccccagccccaccggcaacattttagtaaagcaaaatggcagaaagacagcctaggaaagcagggaaaagaagagccttctgtctttggctttaaaggaagaagaggtggtgagagcagtagggtaatagccgtttctgtgggtggcccaggagaaagatataggaggttcctggagaagaaacatgaaagtctgacttctcgtggaagcctgtggagccctgactctctaagcactgaaagctagtgttaaagacctgactcctccatggaaagttttaggtaatggggtaaattttaagaaaatgaatattcagggtggcccagatgtacaaaaggtgggcaataggttataaaggctcagggagggacagttgggggttgtggaatagattgaaaggaagaatgtccaatctatgggcaaaagctaaatattaataacttaaaacatcaaaatgaggtggggagtatggggaaaaataaagggattattttggaaaggagaaaatttatctcagtcttggttaacctattccccaaattataaaatgagtaataagctatcccatttggttaaggctagagaaccttcaattaaatagagactgaacatttaaatttgattaagtaaggtgactcttaataatacaggcaattagcctgtggaatgtgcaggtagagaatgagatggaagaaacaatgctgcattttgaaagctggttttagtaatttttaatataataccttatgcatttgtagcacttttcaatttacaatgcttcctgatctttgttatctcacttgagcctggcattctcctgttgggcaggtaaagaaagctatgctctcgcctggacttcctgtgttcctttcacagcatcctgctacctctctcatggatgtgaagatagatctagggtgtttagaactctaagctgtcattcaagtaatacatgacaatgtggtttgacatgagttatttgaacgcaaggcttgttttatttacttttgtagttattccacatgccatgtgacacagtgcgctgtgtatggtcaatatccactaatatttgagaaacaaatgaactgttatgcagtttcccttgtcatcctgacatttctagaaggttcctgagaggcagtttagtgggagaataggagtggtgctgatgggcagaggagaaaggaaggacgggcctaggaggctccggctcctttaaccccagcagctcagttcccttttatctgtcttatatgtgtcttatatgttaaatgttaagagtcaaattgtacccccaattcatatgttgaagtcctaacccccagtacctcagaatatggatgtgtttgaaaatggggtcttgggataaaattaagttaaaatgggatcatatgagtgagttttaatccaatataactaatgtccttataaagagatttggatacagagatttacagagagaaaatgatgtgaagaccccagaaggcagctgctatggtctgaatgttctcctaaattcatgtgttaaaactcaacggtgattgtgatagcattaagagtgaggcctttagaaggtgattaggtcatgagggctcttccttcatgaatgggattagcaaatttataaaagggctgaaggaaactgtcaaggcctttttgcccttcttcatgtgaggacacagcattttccccttttttgcatttctgccctttcaccatgtgaggacacacagacagagccatctacaagacagagccatctcaccagacaccaaatctgccagcaccttgatcttggacttctcaacctttataactgtgagcaataaatttatgttcttcataaattacccagtatcaggtattttgttatagcagcggaaatggactaagatagcagccgtgcgcaaaccaaagaaagaggccttagaagaaaccaacgctgctgacaccttgatcttaaaattccagcctccagaactgtgagaaaataaatttctgttatttaaaccactcagttgtctgtggtacttttcttatggcagccctagcaaactagtatattaaggttctgaagagagttaaagggggaaaaaaaggagttaaagcacttaacgcgttatgaaactgcagttctatggttgattatctgtgagagtcagataaatgcttattttacgtttaaatcacataaatcatcagcaagtaatgatgctcgagatgatatagcttcattggacaaatagatcaaacagcttctaaatgttgttattttccagctctagagtattaagaatcaatttgagcaaacattgcatcttggtatcttgcagcataattaccattgttcctgaaaaaaaaaagaagcagtttctaagctgcatgtggcacaaacctattccttagcttcccaccctttgtactgaatacttcaaactctgagcatcttctaaacccataaagaaaaaattggaatcatttcacaaaagcacacaaaaaagcaacatacatatttttttagcatattttgaaatctctggggaagaattctacatcttttaatatcactatttgtttcaaaattatcttgagtctcctggatctgaataaatcactaacattgaaagataagctagctcaccaacattttttagcatggtatggtgtaaccatcaccaattgaggatgcagttttacagcagcgtcactgtcaagaaaattttcactgctgtttacaaaagggaactagtgggaaggcctgtaataaaattgtttctaaaagggctagatgtaaacttggatatttgggatccattgttattttgcctgattccaagtttgtattatttgcaaatgaaattaacatcaggtttttattttttaggcctgctggagtcacaatactgaatctgctctgaaggattcatattttgtattttctaatttgaacctaaattctataggggttttgaatggaattgaaacatgaaacttagttattactaagtgtaaaaaaggttaagataaataggccaagtctatatgtttactgtctttcataataagcattgtctatatagcattctttaagaacataagtgggccgggcgcagtggttcacacctgtaatcctagcactttgggaggccgaggcaggcggattgcctgaggtcaggagttcgagaccagcctggccaacatagtgaaacacagtctctactaaaaatacaagaaattagctgggcgtggtggcaggtgcctgtaatcccagctacttgggaggctgaggcaggagaattgcttgaacctgggaggtggaggttgcagtgagccgagattgcgccattgcactccagcctgggcaacaagagcaaaactcgatctcaaaaaaaaaaaaaaaaaaaaagaacataagtgattggagccttttaagaaacaatcagacaattgtctaattaggaagtggaaaagaaaacactgttttatttacagtctacaaaaataatgttttacatgaaagcataacttattccaaatgatctgttgtgtcagtatctggcaagttttaaaattaaaataattatatgtaaatgtaaatacagactatcattgaccatattccggtgattgaatatacaagctaattctctcacaggaccatcctcctaggacataagcctgctggtaaccaccacaaccaaaatgcatattctattatctcactggcactcagaacgctcacagattattccaatagaaaggcctgtggtttgtaaaaggttattggcttttaagccaaacattgtttctttacttaagtattgaagcacatgtaatgtgtcaccttgaaactgagagttgagcaatgaaagtcaactgctatgcaagaacaataaagggatgcatcttcttgtgtatgctgggagctggcaacctggcaggagtcgttctaaattgtcattcctaaagggatgcatcttcttgtgtatgctgggagctggcaacctggcaggagtcgttctaaattgtcattcccagccctttcttaaaggctggagtgtatcacagtcttgtacttactgccacagatcactttaggtttgcataatctatactgcttgtgagtgagattgactacagtatcaggacaaaatggtataattcatcctctgtgaagagtctaaagtaaattcccaattcagcatgagtatgcaattcaccagtgtgagttctaaatcagcatctctttatgttttctagtatcatgcaatgtacttgaaataatagatatccccaacttttcaaaactttggttgcatacatttgcttgtaagtttgtttagaattcagagcatattttttcctatagaaacaagattatgaatatgccagtaaaatccagttcctattaagagttaatattgccaaaatattgcaaggcttcagctgtcttcttcactaataaacagaaccagaacagaataaaatgcaattagaattagcttcatatttatcttggccactcgtgtctaaggaaaagaaggatcaactaaaaaaagatagggcagaaaacagtcttctagacacttgaaagaccttaaaagaatgaaggtcttagtgacttcaagcttaaagatggggatggttttccttttcttgacacaaatgcgctgttaaccatgctctaatgctaatgcttattgacgataattagtattagtctttgggctcacagtgacgtatgaggggagggcttgagagaataagggaaataaatgtttctaggcaaatgtgcagggatttgatgtaatgtaaagagaaaagggggctctaaatataagcatatatgtgaaaagaatatttacccgaatagaatttatgatgaatttaaggtcgaaatacaacaaaaaatcatcaagtctatcacctcctggcctgcagagaaagaaggaagggagtagggcagaggcttgagatctgacagctccctgttatcaatctctcagtgatatgacagcttgacagctacctggaggcggcaagggagcaggaggcagtgaggaagaagggctagagccaactggatagctgtatgaaaggggtgtttgtatcttgaggatgattcatgacaataggtgttttagtattataccattatttataagcatcatagccattgcagttttgtgtcgcttactatctttcaggcactgtgttaatccctttataaacattatcacacttggtcttattaacttcaaaggagaaatataattacacctattttccagataaggcaactgaagttacatagaagttagtgtcttgtccaagataatagagctagtatatagtggccctgagacttgagccctgagctggccatactaagatgtcactcttgcctagaatgagacatgagcccactctctgatccatattgaggtttcgtgccattaaaatatgagagaaaaaatgtgcacttagaacagtgcttggcacaaagtaaatattcattaaacatggtgattatcatctgccaaggtaaaatattgcttataaaataccaacagggtcaatgttgggtcttggtatttattatagtttttgcttcgttttggtagtctttctccacccttcaggcatctcatggttatacatttctaacttcttgaaaatccactgatttttctttcctgtgcttaaccaacctacaagcctgcaagaacaaggactgttcctggaacatagtaagcactcatgaaatatttgttagatgggatcatttaattcaacaactagatcactcactttggcaagaaggcaaaataaaaaatttagttccatggagaaatatctgtaccatatatatatatatatatatatatatatatatatatatacctgtacatatatgtacatatgtatgtatatatatgtacctatatacctgtacatatatgtacaggtacatatataaatggtaatatctgtaccatttatatatatatataaaatacatatatattataatatattataccttaaatattataatatatcttaaatttttggtataatataccttaaaattttgaagtaaaacattagaaaccgagtaggacttttttttttgtcctgatgctgtagtaacacatcctatggcataccatacataccattaggctttccaatgtaaatagtgtattttcatgtttacactaaactaacacgtgaggaatttagcattactcttcaccagttatataagacacctcatttgaatttttgaattctattctatttaatattctattgaattctatttgcattctattgcacacatggcactgcccctctcttcttacattttaaaaaattacatttagaaacaagagtgaatattgccactaagaacgttcaaaatcatgtttctgagatatatattctatctgctttcctctggctgtgtatccattcatgggtgtaaaaaacaagaatattttattcttgttctgatatgtcctactaatacatgtttgtggaataaaattgccatggttattaaaagagtctgtgacattttctaaagagtgtgggtattgcctgcactgcctggctgaattccaatttgggtaattacattcggctttctggttaccttagcgatcctctcttttgctccaagggtcctcacggtggttgagctcagctgagatattgctgtttgctgtccttagttctaaataatagtagctgaggggttctagtctttggaaatttaattttcatctattttaacaaacaaaatgtacacattttggggtgtataataaaacctggctttctaattgaaattcttcttggagtagagtgggcaatctaatcagggaggaaattgtgatccttgatttctttctctgttcttgatcatatttattattcctatggaaattggagcaattttctaaatttatttaatctcccctgcctctcaaacttcacagcaattttctgaaacttctgttattgttcttatagtctgccttgaagtagagcttcctgtgggcttatcctaggcctgtgacaaatgctaaactgtaaggacctccctactttgttttccctgatggaaactttcacagaatgacatgttgtagttgctcattaaatgatgaatgaatgatttccctttaggttaatgttatttactattaacgactaagcctgtgttttgaacacaaacagactatttattattcaacctaatacaatcgtttcaatgtaaatattttagttcctggacattagcatcactatatcatagcaggttgtgcataggggcagctgcttcccactctgcaccctcaatatactcttggaaatcttaagggtcccgaaagaaccaagccagaattattataagggtaatattgggactgcaatcagtttattctgcactggacgattgaatctgatcataaagtgtaattcaaagcatagggttcccaaactttgaaccactacatcaaaaaagaaaaaaaaaaacggagaagaatggtcgcaagtaggcagtatagttttaactgtcccatcccccctaccaaagagattctctttctcccactcaaggagacatattggaatgcaaatgtcttagactaactttactgtagggttgaacttgaattggttttaacttaaaatttaaaaggtaagaaattcataattgtcattactcattatgaggagtgaaattcttgctacatatcccttaatagatcgccatgtattgttgtcttaatacagatttagattgttctcaaggacttcgaaggactctctcttatacctttaagccttatcttagggaaccactcttgtgcttggtactttggtaacaccaaattgctattcatttcctgcacacaggggggtttctttggcctggaatgccatcttagtattcctgtctggctgacacttgtgcacccctcaagactgaataaaaagcctagaggaaggggtaggtgcccttcttctgtggttctgttgcatcctgagtttacctttgcatttctcccttgttatagcaatgatctgtttttgtatatatgccttttctgttactattggtggaactgaactaagatttcttagacattgcaagtatacagcaaaaccacttgctaaggagccatttccttattgagatataatttttcccaggactgtagtcttcaaggagaaagtgcaaggaaaatcacgtttacctgtgtttctttttcttctttccgtatattaaatgcagtccaactatttactgttaggaaaacccccatgaatttgttttatagtaaatgaaaaaggagcttaattactttctagttaagctcttagaacaccctttctaaaaggtttatctgtaagcccaaaattcctaacttatgttttggaattgctatttcctagttttggaaaatttttaaaattaaatctttttttccttctctttataagcactgaaaaaaacgaataaaacaagagataaagaaagaaatctttttgtcctccctttaaaccccagcaggaaatgagtcattttggtaaatgtttctattatttaaaagtcataagttcatgggttttactctaagattgactcattgctatgatgccatggtgtcaatgaataccaaatcaaaaagctacattgtatttaaaatgtaaaaaaatgagtattatattccttcaagaggcagtgtgatattgtcagaagggcactgacttgggcatgagaagactaatggtccagtctcagatttgccaccagctatgggactttgcctctttggaactcagtctccacttttgcagaatggtgaaatttagaattgggctgctaaaacagtagcgaccacaacaactaaaactaaaaaactggaagaaatgttcaactactccatagaaggaaacaattggaggaaatccagacatttgctaaagatcctccctttcaaatggataattgagaaaacatgttttagttctctcatttgataaagttactaaattcataaaaaagactgatgacaaggtacaggtttaatttttaaaatcttgcatgtaaacctgggatacaatattgaaaatcaggaggcttgtggtctggttcttgcttttggaagaaggctggcattatagtaccctagaaagactgtatagggattgttaagccaaatgaaccagccttgaccaaacctaggaggcaatattgcccagctgtaaggagcatgggctttagaatctctggttgctcttgttaatggtgcgactttaggcatgttatttaacctctgtggagataaagtttctcatttggaaaatgaggatcataatattgacccatagggctttttgaaagattacttgggttaatataagttaagggtacagtaaataacagcaattattgtgaggtgacaaattattatttgtagtctgagtcagatggggattgagtcccagacttgttggggcaatcatctcagacttagtgccaagagtctttaccccgaatgataatcataaacaacatttataaagtgggttatagaattgcacatagattatctcgtttgctcgttataataatcctggatacagctaaaggtcacccagctagtaagtaacagagctggggctcaaaccacattttctgcctcctaacccttattctgtccactgcgattctagttctacttagcactaatgagtctgtggcctaggttaattgcccagcttctctatttagcttaattaataaaataactagaaaagctttaaaaatacttttataatttcagatagtttgtggacaggtaaatgtaaattctaatgaaaatatgttgaaacacaactttattgtaagtattatattgctattactatgtgtgtaaataagaaattcagaataattctgacctttgttttggggattgagatagtgaaatttaggagggattcacagagaccttcaacttgagtggtaacattgtacttcctgaactggtatatggtagttggtgtatcatttgttctttttatctaattgatatagaaatatgtcataataaacttctccaaaaaagactggaaggaaactcacacaaatagagaaatatattggtgcataataaatgtattttaatattttcataacctaatgcagaaatgttttgcaatgtacattcataatataaggagaaatttaagcattataaagaacacatttatattccctaatagccctagcacttctcgtagttaatcttgactttacattcggggacataaataaatctgtatttctcttggctgggactgaggatgtcgtggcagcagtgttaagaaaaactaagaaaattagtacttttgagtaagttgccttgtttatgaacagcttattttgaagaatagacagttcctaatttctgctagtcaaacaaaggtgcatatggacctcagctgctggcaatatgtcagaatcctcatagcactgctgcccaagtgacccaagttcccacaggcataatgctttatagcttacaaagactctctctataccttatctcatgggagcctcacagaaaccctatgatagagtcatcactattagcattttcaccattttagaaattgaagaaaccaaaggctaattgtaggataaatcagaactaggactggaacccacatcattttactgcaaaagcccatgattgtcttcactacatcataacgtccttttatttgcagctctccatctgatactttgttttcctgagctaatcacttacaccagcaccttggttttttaaacttttcttctaatattaaagctcttgacctctttcttattgtaataattaaatatgacgaagactactctagagtttaccaaatgtccatgggtttcaatgatcctaggctgtttatatactttctttacagctttttcttatagtagcagaaaaagtaagttgactttttcattgatgttaggaaatataaggatatcaaggcaaacactccaccacccatcctaccccccagccccaaattaaccaaactacacaacaaccgtgttgtctctcctggggcccaaaattttgttagtggtttaagtgaagacagaggattctctgtatttttgtcttagcatctagcacattgccttgcatttggcattcaattgatttgttttaattttacctaaacctttacattatctagttccagcctgtgtctctgctgaggtaaaaagcacaattatactcaaattgatcaaaataatgatttaaaagagaactatcctttaatgatcatttacacagagactcatgcttttttctgtcattcttgaaaactttatgccatattattataaattgtactgcaaatgttcattctcaacgtgagactcacttttgagagaattaattcataccgtccagttccttttctgggagacatctattattcttcctacgagtttatccaaaagagaaaataatgttttatgctaaccaaaaatgaaggctactatgtgaacaatgagcatggtggtttttcttgcatgattgcatttagttctcctcattgaccctgagaggtaggccatgttatcctaattttacagatgagcaaacagattcaaggggggaagtgacctgacatgtacacatcatacaccaagaagtggcagagcaggtgttttggaatcttttcatagcatcgcaatctctacaaagatgaaaggtagatggagaacaatcattttatagaccatttttgcaggagcttcttcatggtcatattgtccactgtttatactgtcgatagaccagcaaccaccttcataagatatctggctttatggcctatggaaaatggattagactattaattcagaaagaaagcactcaaaggttgtgggtgaatttgggaggtacactgaggagccagttttcatatgcaataatacagctatggagaataatttaactaaatgtcttaatgattgaatatgtatatttatgaatatgaatatacacacatgaatatatatgtccacacatatatagtcttcaaatgttccaggatgaggctgaagctcagttcaactcagcaaatattgtgcgtgtgtttgtgtgtgtgtgtgcgcacacacacaaacttactaggtgccaaatactcttaagggaacccaaagatgagtgagatgtgatttctgccctactggaagtcaagatctagtgaagagaattgaggttgataaagagcttcaatatagacaaacacggatttatttttatactcatttcttaattgatgatatttaccaggattttatcttcagccattcccatttcgtacttttttcttaccctcaggaaaccatctattttctttattttggccaccaatgatgatctgtagctccagaagtttctctctcctggattctaatctcctattgatagctgtcttctgtgcatttctgactgtgttccttagatattttaaatgctaaatatacaaaagcatgcctcctttttatattctctgtttagtttaatagcatcactctgcatcagttttctagagacctcaaatgcatcatttatctatccaccagcttcccatccctcattttcagttgttcatcaagtcctgtgaatgttgtcttctaaacatgccttaaatgtgatcttgcatctctgtcttcatggccacaggtttagttcagctgcatttcatttcttacctggacaatcatccaacaatcgtcttagccttttatttcatcccattcaaagtcatttttaatacagttgcctggttaatctttctaaaatataactgataacatattttttgcttgctaaatgctttcaatgcttcccttctgcctcctggaataggttcaaatcattatcatagccctgctaatctgttattgatctattccttactgccactcctcttttgccaagtacacctgactttggttctgggctaatattcagttattatgtacaaatgaaaccattttctattctgattggccagtactcattccatactgattgttaaatattttgaatatcaccctttctttagtggtaccaaactgtctttctccccagtcatgcacatatttttatgcttctgtgcactttgaataatcagttttatctaccaggaacattcttctttttttctttacctggcaaatttatattaatcctttgagatcctgctcaaatattacctcctctataaaatcttgcctgccctccctccacacaggcagaatttttcttccctccctgtacatatctggattaaaggacttatcatgttacattgtagatattacttactgacctaggggatttttaagaaaaaaatatttttaaaatctccaacatgtagcttagtatttggtgtacagcaaaggctctcataaaacatttattgaattgatagatagatagatctagaaaagttttatgggatggaattcaagattgattttgaagactaggctgaggattgaggctggaaaggcattccaggatggaagactgcatgtgacaaggggcaggaaaggtcagtatattatggaacagtgagcctaagattaagatgcaatgggttataggtagtagtttaagataagtaggttgggatcaaagagtggagtgttccaatagccatagtaagaagtttggactacatcctatgcattagaagactgtgagcatgggtgacattttcctctatgtttcagtgagacatctctaacagcactgtgctatatgcattgaagacccagagcctgcaggtggccacggtccaagaagggtcagatgaaaaagtcgccatctaaatctatgagattgcagaggtggaaataaaaatgaaattcattttggaggcagaattggcaagattttaaaattagtaaagtgtatgactaaaggaagagcgagaaatcaattataattacaatgtttcaaaattaagtgactaagagaccagagatggtgtatcatgggatgattcacagaggttatgtttggtgaattaaaacaagacagaagaacatagatgctaccagctatagacacatatttctaccatccttggaatcttgattaaaagtttacctcatatgttttctctgtatttttctatgtttaattcccaagtgtagttacaagcctcactggaaaattcagaagcaatggtgataagcactaccagtcactactgtaggaacttgttaaagataattcaactaacagagacaattataaatgttccttttttacggagctgggaccacaaatgttacctctcaaatattcgttgtcaaagcagcttattttatatattggaacatacattattttgtattattggctacaccaaaacatcattaacttaaaacacaagagagaaaatacttattcacttaacagggtttgaattgctcatgttaaccaatatggtaaccagaagctacatgtagctgtcgagcccttgaaagtggctagtccgaaactgagatgtgctgtaaatataaaatgcacactagagtttgaagacttggtacaaaaaatgaaataatgtcatctatcttataaataatttgatagttcccttacatgttgaaatgctaatcctttgaatacattggttaaatgaaatacattatcagaatcaattccacctgtttcactttactttttaagtgtggctcctaggaacatttagaattacatatgttattcacattacatttctattggacagtgctggaatggtgttcttatttagcaaccagccaacaggcatcttttaagttcttgtgtacagatgattaaggcttgaagttagctgagaagttgcaattgcataaagtgatgtatttttagggcttgatgacatttcaatcaatatacaaaatgttggttaaaaaagcagatctaaatgtctgtggatttgatctgtctccccttttaaacattagttctgttttttttacactatctcaccaatatcctattaggtgatttataatgatccattaaatcttctgtttgtagcaaaacagtcaggaatttgatttgcaagttccctttggttagtggaaaagaattagcacatatccacatatgggtgtcaaggatgtagaggcctggaatataatcactatgcttagtcctcaaactatatactcaacatatcttattcgttctctgaagagtcagaacatacttctcagtgtcataggccttggagtcatccagaatattatttgttagcaacagcatagaagaaagaaaagaaagaggagagagaggggaaggcggagaaggagaagaaggagaaggaggaggaggaggggaaggaggagaagaaggagaatgagaaggaggaggagaaggggaaggaggagaagaaggaggaggagaagggtaaggaggagaagaaggagaatgagaaggaggaagagaaggggaaggaggagtaggggaaggagaaggggagggaggagaagaaggggaaggaggaggaggaggaggggaaggggagggagaaggagattatttgcactttataaatattgacgttttggattaaaagatattttctatgtgttgacggccttactgatattatatttgcactgttcttccagataaaccatgtgaatatctgtgattgtacagaattcactattttttaagtaaaatgactagtcattggacaatattttaatttcaattttttgagcaaggcacttgattttttaatgccttagtttcttcaatcttcaaatgggatagatttttattttgttttgtttttatggtaatgagaagtaaatgctttattttttaaaaagctaagtctctaattataatgaaaagtgcttcaaagctacaacaatatcctgactagatcataagtggcaaaacaacaatgtaatacagaagatgcaaagcattctttgaaaatggcgacttcgttttaaaagaatttctattgcgttagagtagtgcctatgaaaataaataagtagtgaaaaaccattcctgagtactcagaaagtatttatgaataccaagatacgaatgtagtttagctttgcaattccgaattaatagcctgcctagggaacatctcttatttaaaaagggctgcctgaattaaggttaagttatgtttggtttcccaagtgccagtcaggatgtgtttttatattctgattaccaaaaagcattttatttcctttttaaaaagaaaatttgcatgagttgctgaatagcccacatcatggactaaaatgctctaaaagtatgtacaaacaaagcaaaaagaggaaaatggctaacttttcaaatgaatacggtgaattgaattattcaagactagactgcatattcaaatatgagttatacattttgacaaaacattgttaacatttctgttgactatgaataagtattaataatacacagattgtacctagtattaataatacacagattgcaccctgtattctggctgcaaaatacgccaaatgtaccattgtctctctgcattcagagtggtatatatttttgagtctgcattgtaatatatgatactggtctcaatatctactcagtctcaaaagaaagtatctgtgtaaatggattatttttatataacttatatgttttaaaataccaatgacacttaaaacgttttgctttttaattaaaatctttaaaataaaaggaattaaggcatttaaataaaaaaacaaaagcccaaaaaacaaaagcattttattcactgaggcaaagacacatgaaatactttctgccaggtcaagctgtctttctggattaaggtagcagactggtccccaaataaggaggaacaatgtcagcagctaaaatagctcagggatatgaagcagtgttcagctttcaacccatatgtttattttgagctgaacgtttggccattgattcaataattgtttattgagttccttttatgcatcaagccttagcaaaatagacataactacaggctcatggtacttacaaactattgggggttggagggggggattaacaaataatgactagacaattgtgcaagtaagtacagtggtaagaagcaatggttaagagcacacactctgaacccaggcttgagtttgcatcctggctttaccacttgttagctgcagaagcttaggcaagttattttatgttgatatgcctcagtgtcttcctcctcaaggttgctgtgaggtttctgttaaaacatatagtagtctagcacataataaagtttatataatttgctattatcattctttttcttacactgtaataagtgctgcaagagtaaatatcaccaggtgactggaactgggtgtaggagtttggagaaagctttcctaaggaaaagatgtttgaattaggatcttaagaatgggtaggacttaaatagattgagaagattggaagtgatgaagggagtggaattgaagttttaaagaactttccaagcagtaaaaataacatgtacaaagactgaggcaagagggaacatggtaactaaacagcccccaaagcagcccagggtagctggagggagggagtgagatggggaaccaaaaagaagggtgatgatctttgctcacaagaggaactcaagttttgcttctccccccaccccgccttctgtctctctttctctcactctctctcctctctctttctcacaagggagggagaggatattttctgtgtcttctctgcccagccttggaattaaaaataatttacaagtggctctacatatataaccaaaatgcaacattctgtctaaatataagatatgaattaaattgccgcttggtattcaacttatctttctatatgcattataattgtctatttgtgtttatgctccacagccaaacctaagtggtgcaactagctggaaggtttcctttttttttttttttttttttttagaatactcaatacaaaagaggtgggatgattgggtactaattaaacctaagtagtaagggacttaaggaaaacgagatttctgtatttctcctaatgggatgaatgtcatgttccaattcctactttatgtaaaatccattgtacaatatgtaaaataattctccaaatcttgatttcctcaattgaaaatgaccctgagcataaactataagtagaggaaggtttgaatttcttgatctttggtactcttttgttctctcagtacgtggagtcttaaatcagcagaataatttaggaatggtagatattgaaacaactaatttttcttttctgtaatctgcatagacttcaaaatgcctacaaagcacaaagtgccagttcatataatttgttggcaaggataaaaagaagaaaggaaattatttcctaagcgtgtgaatcagcccagctttaacagatatttttctgtcatgtgcagcctgagggcttatgcctatctgagctttatttgacaattaccacttgccagcataattaaatgataatttataaatactaagaaagcataatggggaagagcaaataggtgcttatcagggcattgaataaagttgatctgctccagtggcaattttcatctcttatcttggttgttaactggtctcactttgtatgcgtgttttgtttaggtttgatatttgttagggtgatattatctacctcatatacaccttttccctccatacaaaattctaatatttcttttggtattcattttgcaaccaatgtatttacaaaatattgcttatattttaattcataatataaatttaggatttagaattgcacgtattactagacaaaaccccaaataaataggaatttttctgtttgtctccccttccccccatcttttttcagtgaataaggtcttttctgtgttgtgtgtgttattttcttttaatcggttttttaatcacctgggctttgcagttaattacattccacagagtctcttcatctatttcctagaatgctggcagattttttataagtaagagagaaagcacacatgtaagccatggactccggtgaggagggcttcctaatcttgcagtgataagaatgatactttatatgcagcatggacattttgctatgttcctacagaatatagaaattacccaaagaagaattctgtagggcagacagcttttgtcctatcagtatctcttctcaagttttcttacctattataaatattagggcaatctgtgcagaagttgtggcgaggccttggacagaaacacagatttgtcctgggtaacctagataaagcagtgcaagagcaatcatctatttgaatggaaacaatcagtagaatgacaaaaaaaaaaaatgaatttccatgcttttagaaaagcaggtttgaggaaggcaaatgggggaagaaagcaagacacattagtgggtcatgaagagactaaggtctctctctcgctcactctcttttttttttagccatcacaaaattaaataattttagtaactactgattaggattgtggtggtttgagtgaagagtgtgcgaatggcttatcaggagaataacaaaataaagggctttggtgtttaaagttgtcaattcctcaaattattcagcattttgtccttataaatagcaattatttgccatttcagagctgaaaaattatctttcatattcaaatatttaaatatacagtgccgttactggggcaaaaaaaaaaaaaaaatcctaatgtcggaaccgatttttatacaaggaataatttgaaagtggtggattagtttccaccttttgaaacacagtgctttctgtaatcttcaaacattatttaggataatggaagccatcatcctggttctcaaatgttagcacttccattagaatttgcagctacctcttattttttatattaaaatacaaggcttaaaaggtattatcttactaaaggggggcaattgtagagatgatttgattgaataaaggaaaaagctgtacaggccttttaagatcaaggatgtattgatggaaagctatcattagagacaattaatgttctccaagggaagaaattgattatggacaaagatggaccctaaggagcagatatgtcttaatgccctaaggccttaaggattatacatctcattcacagcatctgtattttaaccctttgttgtaaatagaatactagcttattcttgcagtgacatgaattaaatttataaaaaggaatgtgccttgtaaaagatgctcatagtgattgacttttgattctttaaataatattaaaataattaaattcatggtatcttttctctatactgccctttagagtagatctagacatagatttgtagaagaaataaaattagatagtgatggccagtcttcagcattatgggagtgtggtaacgcccaataattatggttaaagacgtgttttcattaggagcccctgaacttcagctgcatttatgtttccaaataacatatccctttaactttgcttgtccttcctatagatcttgtacaaagcattcatcatgttgttagccagtccctagcagccgcagatcacaattgggtacttaataaggtggcaaccctactgggaacatttcacgtaattattcttagcagaaagaagattgttatggcttttttttttcctttttgagtctggcaaaattccaggtgatttagtttgtgctcctaaaaacctgttatatatcatcggtgaattatacttcatgtgtatgctgcatcctcacgtccctgccatgtatattgcaggccagcagacagtttcactgtacagttggtctcctctaccagccagccccagaaccagttccagaaccagtcagtgatgcaaactgctttttggccgtaggtttcggagtgtgtcagtctgagcatgcaagttctttttgaaatcagcctctctcaagaccactgcactctctctgatggtgtattatgattatcactaaatgcacatgagaaactcacacatgaagtagtgaataacttatccagagagctctgtgattttaagtaccacttaagggaaagagagtttagacccttggccctaactttgagcttctaagttgagaaataactggcatttagttaaccagatcattaaagcagtttagacttcaagttctaacaatttaaagctataccttgattctcctggaccttaaagattatgcatttcattcaccatgactgaataagtttgtctaaatatttcaaacaatttggaaataattattttaaaaaacagtgggcaaataagcatgataccttatattatggtgctactggattgtaagtttaattctcccagctgcatggccaactaatgtctcctctcacatgtgaagacaaacacctttacatgtaagaaaagagtttcctagatggttcttcttaacaggaaaaatggagcacagtatatacataatctttctttgatttagacctacgaatagaacatacaagggttgtgaaggacctcttcaaggagaactacaaaccactgctcaaggaaataagagaggacacagataaatgaaaaaacattccatgctcatggataggaagaagcaatatcatgaaaatggccatactgcccaaagtaatttatagattcaatgctatccctgtcaagctaccattgactttcttcacagaattagaaaaaaactactttaaatttcatatggaatcaaaaaagagcccttatagccaagacaatcctaagcaaaaagaacaaagctggaggcatcacactacctgacttccaactatactacaaggctacagtaacgaaaacagcatggtactagtaccaaaacagttatatagaccaatggaacagaacagaggcctcagaaataatgccacacatcttcaaccatctgatctttgacaaacctgacaaaaacaagcaatgggggaaggattccctatttaataaatggtgttgggaaaaccagctagccatatggagaaaactgaaactggactccttccttacaccttatacaaaaattaacttaagatggattaaagattcatacataagacctaaaaccataaaaaccctaaaagaaaacctaggcaataccattcaggacataggcgtgggcaaagacctcatgactaaaacaccaaaagcaatggcaataaaagccaaagttgacaaatgagatctaattaaactaaagagcatctgcacagcaaaagacactatcatcagagtgaacaggcaacctacagaatgggagaaaaattttgcaatctattcatctgacaaagggctaatatccagaatctacaaggaacttaaacaaatttacaagaaaaaacaaccccatcaaaaagtgagcaaaagataagaacagacacttctcaaaagaagacatttatgcagtcaacaaacgtatgaaaaaaaagcatatcataactggtcattagagaaatgcaaatcaaagaccacaatgagataccatctcatgccagttagaatggcaatcattaagaagtcaggaaacaacagatgctgaagaggatgtggagaaataggaatgaagctgttttacacttttggtgggaatgtaaattacttcaaccgttgaggaagacagtgtggtgattcctcaaggatctagaactagaaataccatttgacctggcaatcccattactgggtatacatccaaaggattataaatcattctactataaagacacatgcacacgtatgtttattgcagcactattcacaatagcaaagacttggaaccaacccaaatgcccatcaatgttagactggataaagaaaatgtggcacacatacaccatggaatactatgcagccctaaaaaagaatgagttcatatcctttgcatggacacggatgaagctggaaaccatcattctctgcaaactaacacaggaacagaaaaccaaataccacatgttctctgtcatcattgggagttgaacaatgagaacatatgggcacagggaggggaacatcacacactggggcctgttggggagtggggggcaagaggagggatagcattaggagaaatatctaatttggatgacgcgtttatgggtgcagcaaaccaccatggcacatgtataccgatgtaacaaacctgcacgttctgcacatgtattccagaacttaaagtataattaaaaaaaaaagaaaagaaagattatggctaattttttatttaattttgaaatttccctttccagttcattttcctttttggggaagggcagaggtgttatctataatttttattgcccacattgctgctgagaagtggcattaaggcccttttagagaggtagtgtagcttgtgaaaagagtgagtttgcagtagaaatagctaagtaggggctccaactaactacctgcctctgaggttttgaaccctgatgcctagggagatggtggtgccattaacaaaaataaataaggaaggagaatgagctagggagaggcatatgaagcttttgagtttctggtcaaagccaggcagaaatgcccagcaggcaattggaaatgaaggtatggagtttaggagagaggtcaaagtttataatactgatttggagacctaaaaaagaattgaaagttaggagaaagaatagtctaatgctgtgactattagtaagtccagagagaagaaactttcagggagagagtagtcagttgcctttgatgatccagggagatcaaggacaataagaatctagaaacaaggccattgggtttgatcatttatagctcattagtcggctgaaaagtctgatctgcttgagtttaagtcccaattatccaattactaaaggacatgtgtatccttgagaaagttacttaatttatctgggcctaagttgaaccatttataatttaagaatacctcagtgtaccccttaaatttgttttgaggattaaatgagatagtccatgtaaaatgcctagattactaggtacctgtggaacagtaggggccataaccagataactgggatcaagacatgatgagggactaggaaatagaagattataaaccactatttggaagtagggaggtgagtggttgaacaatttgtggaggaaccagagatctgagcagcttaaagtctaaaatacataaagcaccagggacatattctgtaccctttatataaagtaactcgttttgcttcttacaacaaccctgaggggtggtaatatcattagaacaaaactgaggggtaaagaagtaacctccttcaagatacatagccaataaatggctgggcagtacctagcaccaaggaatgtctaactcataagtctcctatctgtttcatagatcagtacacatagaaagattaaactaattaattaagggacagagccatgatctgaatccatgtctatccagttcttagttatctacttaatagataatcctcctttccaattcctgactataaaagcatggagaggagtttacaaggatcagaaatttggggtccactggcttcaggtggctctacttagtcaccagtgacctctgtagttggaccatgttggaagaacttaatgtagtctgtcagacctaggatgtcagagtctgggagacatgtgtattcttcctgaataaaacctgtgaaatgggccctaataagatcctacaaacttgggtgttgtagagtgaggatgagggaggatgaatgagaatgagccttcaggctatgggggagacatcagaatgtagttgttaaatctgtgctgaggctgccacctggggaataaaataataaaaactgacccagatccagcacaaatgtgccttctgtgtttatgcctttccagaatttagcaaaataaacttgtctctgctttaaattgagtatctctgaactatcctggagactgattactgcagagcagtggctcttggagtatcttctctggaccagcagcatcagcatcacctgggaagttgttagaaacgtagactgtctgccccaccccagacctgctaactcaaactctaggggtaggacctgccagtctgtgttttaataacacctgcaggtgagattctcatgcatgctgcagtttgagaaccactgtctgaatctaatttgcttccaagttcttctggtgactaactaatgccaagtggccagatagatctggttgtggtatagaactgtggttcccagtctcaactgccatcagaatcaaattaaaagatttagttcactgaaaactggctgccactcccagaaattcttatttaattgagctggggtgtggcctaagcattgagatttctgaaactcatccccccatgccctctccccacccccccagtgattttaacacactctggtctaaaacagtgtttcccaaactttagtaaaaatcagaatctcacgtggagagccagttaaaaggcaaattgggccgggcacggtggctcacgcctgtaatcccagcactttgggaggccaaggtgggtggatcatgaggtcaggagatcaagaccatcctggctaacatggtgaaaccctgtctctactaaaaattcaaaaaattagcccagcggtgtggcgggtgcctgtaatcccagctactcgggaggctgaggaggagaatggtgtgaaccctggaggtggagcttgtagtgagccgagatcgcggcactgcactccagcctgggcgacagagcaagactctgcctcaaaaagaaaaaaaaaaaaaggctaattgttgggtcccaccctcagggtttctaattcagtaggtttgaggtgaggcccaagaatttgtatttccagtaagtttccaagtgatactgatgctgctagcttggggatcacactatgagaattgctggtgtggaagttaaatattcatttttggaggtatggagctgataatttccatcgcaaagctcccatttctgctgccaggcctaggtgagggtctttgccagagagtcctggcgatgcctccatttatgtatctcattggcaagagagacttggtctggaaatacatgtggctgtgcagtgcttctcaaacattaattagtgtacagatcacccagagatcttgctaatgtaggttctaattcagtgggtctggggctgagcctgggggtccacatttctcacaagctccctgacaatgctgatgctgccagttcatggaccatgctgggtagcaaggcacataagaaagtgtttcttaaatttttctgatgatctcatctacctgaagtgcttttactagagatttttggcttcccctgtgacctactgaatcataatgcccagggaaaacagccttacatatatgtatctgtaagtgacttattaatttattcaacaaatattgattaaacatctactttgtgcaggttccatgctagatgtgaacaaagtagataaggagtcctttatcttatggggcttacattttagttggagaagcaaacaataacttataatagcgacaatcacctcaaggtccacgaagcacggccaagtgtctgagttctggggtgaagcagcattgcacagggtgttcaagaaagcgtttccaaagaggaaccaccccagctgcagcttgtttatgtgaaggtcttgggtaaggagaagcaagggctctgaggatggactaagcttggccgattgcctgcagttaggggtggggagaggatcaaaggtaggaagattgagtgcccagctgattttgatatttcgtcacatttggagaacacttcaaaactctttcttaccagctgtcagagaattgagtcctgcccattttgaaaacatcatcaatcaccccatcattggtccctagaggaagaatgtagaagctgttatacagtcccctaatggctgataaaaagaaattgtctctgcaattcatagggataaaattacaatgatttcttgctaattatttaactatgcagtagtgatcttgtacacagtcagaaagtaacaaaagtatgaaagaattctacttagagaatgtttctacaactttgaggtttgtatagcataataaatactttttggagggtttgtatgattttccagaaagcccaaatgcatgaataaaaggagcaagaaaaacaacaaagagccaagaaaaaaataaaaaacaaaaaacaaagcaaaacaaaaaaagaggaaggaatacacggggtttcctgagggagcaagtaagctcaagtgtttttagcgttaagttacaaatttgttttatgactgctatttacatagataataattttgagagcttacttttttatatatgctgcatttaaaactacctaaatggcagaagaaaaataaataagaactctttgggcagaggcagctttcacctgtattattttttttcaagctgtgtgcactccttaattaccagtttaaaaaaaaaaaaaacacttaagattggtaacatatgttgttgtcagcatgtgtttagcacctgcagaaatgaacatgaaaaatgtgacagcgcataggtggaacacccactgcattgactgtgaacactgtcaacaaattttactttgttagttttttcttattaaaaaaatctaagaaaaaaatttaatagcacaggtgttcggagcatcacagcaagacgatataatgaaggagaggctataaacctttagcatgagagccgaggtctagatctgcacatctttaagctttgcctctcacacacttcactcttcttttcttttcttttttttaaaaagcccctctgcatgttggaattggcaggcttgtttgtcctgcaaagcatttcctctcagaagtaacggtgagaagcagctcaggttcactcagtggagatcagctgacaggcaggaccaggcaaacagcacctaaaataaccattttccaaggttggagatggaggtgtttatcttgcacattattttctagtaatgaagtcctaatcattgtgggtaagaggttttctgtcagcttcttctacagcaaagcttctatgaatataggctctgtcttctgaactcttattttggggtacaggaaatttcgtttggctaatggcattcctcaaaatgcagcgctatgcagagagcaggccttactgaatgatgctgcagttgctatgccttctctggtgttactggtttgttctactgtagaatgagaatgttgcaagttgctttccataatttcctatcattgattgtttcatttcttaattcttagaaccaatttcactcaaaaggagtgggttatgtatgctcttcatttgcagagacatttctccccaaaatgactttgccaaagttcaaaataaacactggcaggtgtgttaattcctactttggaaactttgaagtcaacttgtttccacaaaatcttccccattttcacacctcttacactcgttgtgaggtctaattactgctaatcttcattctggcaggctgtaaaaagaaattcagtgacaaagtattccagtgacccaaagtattcctgtggcacaaaatagaaaattttaagttaagtttaagctcagccaggtctgtatttcctctccgacccagggaaaaggctcttgattgagttatggctctctggctgcgtggtgtgggaactgtttgcacttctcatggctgagagaagaccctggaaatgacacgttttacacctcttagatgagactggggaactagaaagcacttcactcccgtccctctgggacgaagaatctgtttgcagtaatcactggcagtgttgacagaatgttcaaaaccatctgctcaagggcaagtgttaactctatcaaatcctaatattttaagcacactgatccctaagcccaggagacctcctgatggagctctccttgggctctgtgtcagcctgccatcagttattatcccgctgcagaaaggcctgatgcaccagccagaactcagtgaggagaggctgttagaatgagaaatgcagcaacagaacgcacttcattcaagtcttgttagttatgatgaatctgaggctttctgattctttaatacaagagtttctttggaataataactgcactttttgtctttaaatgtattgtgttaaatgagcatcttgatttgttagaatccagcgtataccactttcagcatagatttgtataaattcatgtagacttactgtgcgcacacaattagatacaagtatgcttccagccaggcatatatcatcatgttaaaatcctttactaatattacttaataaaacataaaattcagcggaaagatttttggtacattattctcccaataatcaccagtcatcaagttgtttaaacaggtcagaatatttatttacttttaatatacttaatatactttgctagcacaattgctccaaaatatttcagaattaaaactgatagaggaattggggggagcatatagcagtaaaaatattccaaagtccagtgaaccaaaaacactcccttctcaaaggaagccagtcaaaattttctaggacaggtttgagccttttgctgcaggaaggacaccactggaaaaaaaaaaatgcacaggcctgagccatctgtgaaaatatctccctacttctccatccttgtcagagacatttcagtaaaaccgacattatctgtcatagtgacttggggtggttaaaggaaatactgagaagaaacctagcactaagagaaacttcttagccacaatcccctaaaagttcaaatatgatattttaatttttaattttctgtttctatttctgtgtatgtatgaatttcatcttatgccacttattaggccaggctattgtaggtgctcaataaattacatgttaagaaaatggaaataggctttgctctactatggttttaatgttatctgaatttatgtcccagatatgcagaagagtaattagcagagttctgggattgtagtcaccaccagcaaatacaatgccatcctcacataacagtcgctgggtgtctgctagcatgtgccaggcacttttaacatattttttcattacctaattacatcagatacattaagcaaatcttatcataagccccatttcagagatgaagaaactgaggcttagagagccaaatagcttggctaaagtcaaacagttaataagtggtggagcccagacaggaacctaggcagaagactccagacttcatgtgctcaacataatgctgaagcactgctaaaacagaactatttaatttttttttttttttttttttttttttgagacggagtcttcttctgtcgcccaggctggagtgcagtgccgcgatctcggctcactgcaagctccgcctcccgggttcacgccattctcctgcctcagcctcccgagtagctgggactacaagagcccgacaccaagcccggctaattttttgtatttttagtagagacggggcttcaccatattagccaggatggtctccatctcctgaactcctgatccgccccgctcagcctcccaaagtgttgggattacaggcgtgaaccaccgcgcccggccactatttaaattttacagaactctaggaggccaaagaacacagagaggactgcacattttctttcagagtctcatcaaatgccatttattcatttattggtcagacatttattgagggtcaagcactgtgctacccggaggagataacggggattgaccttatagcttagagcagtgaaaaatctggggaagttataaaacaccattgcagaaaaatgcacaaaggcacaacatttgcaattttgttttgagggaaggggctgtgagctacaggtttagaacttctgggagaggttccgtgtattaaaacaaggcaaaacctatgtagacatttaataaaaattctggggtagtacaagggcaggatttagtaactgcttggagaagtcaggaaaatgaattttggagtgctgtgcagtgaacagactaaaatctacctacaaagtcccatctcacctaaaaacctaatagatttacattttaatcattctgtctaaaaatgaccatcaagacttctcatctgacagtttctgatcctgatttccgtgagaggatgtaatatttctatgattttatatttatctctgctatccagaaaacattgtgtgttgctctcagcattccatattttattgtagttctcattgtaactgtgtttctgtgtctttctgtgtgtatatgcgggggaagagagagagagagagaaacttagtgaatacttaagcacacaaatttactaataactaggagcctggttaatagaagcacttagatcttctggacctcttggatcagtttcttaaaatctctgagctttagtttcttcatctagacaagaatacctatttcttagagttattataaatattaagataatgttttttaaaagtgccaatgttttttatcaggcacattttaaaggcttaatgaatattaattccttctctggtgtcctcccctcatcttcttcttttttttttttaatatgctatttgtaaaagggaacaatgttggtaaccttggtccacagggaagaaaagggaaagtaatggcctattcgtataaaactcattggggaatggttccctgaaaattaacttgtatttctgtttggatatgtgccttttatgttagcattacttgagatgaggctaccaaaaatttctgtaattaaaataaataaactggcataatagtttgctacttaatgatgtctaaaaagatgattttactttgtgcctatatcttgaaggccagcttttttttccatctcctgaaatatgtaaagagttctgcagcagagtcctgtccttcaatatgatactgtttatttcttcagatagttacgtgatgatgaaaatgaggcactgtcctaggtgctgaagggactgtcaggcattagaagagctatagattcaagataagactaggtaatggtgagtgatgatttttaaatgcacatgtatgtacaggcaataattgttctaaagaatatcctgtacctctgacaatgaaatttaaatgatatacactccttaaaatcccacctttaaaattaaggaagataattaaaataaaccatgtattaattgcctgtacactatagaggcccatattaatgcaaaatgctatcattatcttaatttccaggatgatcgtcagggatataatgaggctatctataaggtgtgagtgtttttgttctctgcttatttgtaacattaataataaagaagtttaatatgttctgtaaacagtggcttccaaaaatacagagctttcagctttttccagatggctggtttttgttgaaaggctttctgaggagtgttaatttgttattcaacccttattcactcagtgtgttctcatctcactatctgtcagaaattctcttctttcaagaattctgactcttggtcatttggatgtagcattcacctgtgtgggataggagagaagaaagtgagtccctgatgcttatagagaagaagaatgctgagcattccctgacatatttcctggtcaatgcctaatatagatgaatgactttaccttttgggaaatgggaatacaataggagacttgccccagggttatgtatctagggtgggccttgatcacagaggccaggatgtccaaaaagggcaaatggaagattgaaatgtgtgttcaatttttctgcaggctgtaatggaaaagggggaatgacagtcccccttgggaataagtgtcttcctcattctgtgcagacatttagggagtattgcaagctgtgagcttctctgagcacatcttgtctcttgctttctccttgctgagcccctttcctctgttgctccgtccttccagctgcttctgtgaactctcctctgccgtgtctcatcccccatggctgctcaaatgtgattcctctaagcctctcttcctgtccagctgcatctgttcacctcccctgctgatcgatctacttctttagctcagggacagcaagaggaaatgattccagcagctaaacagcttttatgcagagagaatatttaaatattctcagtttgcctgattccccttcacctcatgctatgatcagaggttaatggagacagtttggagcttctctctgttggtagaaaccagaagacttttagaaacgaaggccaaggtcttgcaacatcccacccacccaccccccaaaaaaccctataaatttattaggagggtagaaatattttttttcatcaaactcattatttttaaaatagtggtccgatgttccagttctccctctcacccccacccaccctccccaccacaaaaaaaataaaaactctggacaagactgcagccgaattagaagctgtaattaattttcatcatttttagtagatgaaatcttaaaatgactgttgtattctaagtgtttgtatcactgaaaattatcttttgatatataaagtgtatttttacagtgctatttagtgaatatctgatttttttaagatagtttatttgggcaaatttaaactgtgagtcttggtacaaaataatctgccaaggcagagcagttgtgaagattaaatgtagcaaaagcctagcatagtgcttgacccatcatgcccagtacacacacacacacacacacataaacacacacacatacacacacacacacacacagacagacatacacacatacacacacatacagacacacacatacacacaaacacacacacagacacatacagacacacagacacacacatacagacacacagacacacacacatacagacacacagacacacacacacacacatatatatatgagtatatatcctccatgcattggtccaatatatgtatttcttttaattaattatatattgtctctgcatgttgctatgccagtttacttatctatttccttattcttggacatttatcttatttcaatttttctttctttacctcccttctcttcccttccttgctgtcttccttccttcctctcaattttttaatttgaaaatttgtttcttacttttcttcctttcttgtgtccttctgtcttttcttcctttatttttattttccttttctcattaccttcaggtgtattgagaacaccttgtatacatttttctttttctttggctgtagtcttctgttgtggtataattttaccaaataaaattcctaggtcaggggtctgaataatgcctgtctgtattattttctccaatgttggcccatattttcatagtaaatgtacatgctatatatgccaggttccccatggtcctaccaacattgagttttcttatttttgtgtattcagtaaattttaatggtatttttaaaggtcttttgatcagttagtagggctataatttttctatttgttaattttatatttagagtttttgtatgtaaactgtctatcttctttttttattattgtactttaagttctgggatacatgtgcagaacatgcaggtttgttacataggtatacatgtgccatggtggtttgctgcatccatcaacccataatctacatttagtatttctcctaatgctgtcccttcccttgcctcccactcctgacaggccacagtgtataatattcccctccctgtcagcatatgttctccttgttcaactcccactgattgagaacatgatgtggtatttggttttctgttcctatgttagtttacagagaatgatggtttccagcttcatccatgtccctgcaaaggatatgaactcattcttttttagggctgcatagtattccatggtgtatgtgtgccacattttctttatccagtctaacattgataggcattggggttggttccaagtctttgctattgtgaatagtgctgcagtaaacatacgtgtgcatgtgtctttatagtagaatgatttataatcctttggatgtatacccagtaatgggattgccaggtcaaatggtatttctagttctagatccttgaggaatagccacactgtcttccacaacagttgaactaatttacgctcccaccaacggtgtaaaagccttcctatttctccacatcctcttcagcatctgttgtttcctgactttttaacaattgccattctaactggcgtgagatggtatctcattgtggttttgatttgcatttctctaatgaccagtgatgagctttttttcatatgtttgttggccgcataaatgttttctcttgagaagtgtctgttcatatccttcacccacttttttgatggggttgtttctttttttcttgtaaatttgtttaagttctttgtagattctggatattagccctttgtcagatggatagattgcaaaagttttcccccattctgtaggttgcctgttcactctgatgatagtttcttttgctgtgcagaagctttttagtttaattagattccatttgtcaattttggcttttgttgccattgcttttggtgttttagttatgaagtctttacccacgcctatgtcctgaatggtattgcctaggttttcttctagggtttttatgtttttaggtcttacatttaaatctttgatccatcttgggttaatttttgtataaggtgtaaggaaggggtccagtttcagtttactgcacatggctagccagttttcccaacaccatttattaaataggaaatcctttccccattgcttgtttttgtcaggtttgtcaaagatcagatggttgtaaatgtgtggcgttatttctgaggcctctgttcttttccattggtctatatatctgcttttgtaccagtaccatgctgttttggttactgtagccttgtagtttgaagtcaggtagcgtaatgcctccagctttgctctttttgcttaggattgtcttggctatatgggctcttttttgttccatatgaaatttaaagtagttttttttctaattctgtgaagaaagtcaatggtagtttgatgggaatagcattggatctataaattactttgggcagtatggccattttcatgataattattcttcctgtccgtgagcatggaatgttttttcatctgtgtcctctcttatttccttgagcagtggtttgtagttctccctgaagaggtccttcacttcccttgtaagttgtattcctaggtattttattctcttagtagcaattgtgaatgggagttcactcatgatttggctctctgtttgtctattattggtgtataagagtgtttctgatttttgcacattgattttgtatcctgagacttgctgaagttgcttatcagcttaaggtgattttgggctgagatgattggttttctaaatatacaatcatgtcatctgcaaacagagaccatttgacttcctctcttcctatttgaataccctttgtttctttctcttgcctgattcccctggccagaacttccaatactatgttgaataggagtggagagagagagcatccttgtcttgtgttggttttcaaagggaatgcttccagcttttgcccattcagtatgatattggctgtgggtttgtcataaaaagctcttattattttgagatacattccatcaatacctagtttattgagagtttttagcatgaaggggcactgaattttattgaaggccttttctgtatctattgagataatcatgtgttttttgtcattggttctgtttatgtgatggattacgtttattgatttgcatatgttgaaccagccttgcattccctggatgaagccaacatgatagtggtggataagctttttgatgtgctcctgggttcggtttgccagtattttattaaggattttcgcatctatgttcatcagggatattggcctgaaattttctttttttcttgtgtctctgccaggttttggtatcaggatgatggtggcctcataaaatgagtgagggaaagtctctccttttctattgtttggaatggtttcagaaggaatggtaccagctactccttgtacctctggtagaattcaactgtgaattcgtctggtcctgctctttttttttttttgtggtaggctattaattactgcctcaatttaagaacttgttattgttctattcagggatttgacttcttcctggtttagtcttggtagggtgtttgcatgcaggaatttatccatttcttctagattttctagtttatttgtgtagaggtgtttatagtattctctgatggtagtttgcatttctgcaggatcagtagtgatatcccctttatcattttttattgtgtctatttgattcctctctcttttcttctttattagtctggctagtggtctattttgtaaatcttttcagaaaaacagctcctggatttattgattttttggagggtttctcatgtctctatctcctttatttctgctgtgatcttagttatttcttgtcttctgctagcttttgaatttgtttgctcttgcttatctagttattttaattgtgatgttagggtgtcaattttagatcttttccactttcttctgtgggcattgagtgctataaatttccctcttaacactgctttagctgtgtcctggagattctggtacattgtgtctctgttctcattgctttcaaagaacttctttatttctgccttaacttcgttatttacccagtagtcattcaggagcaggttgtccagtttctatgtagttgtgcagttttgagtgagtttcttaatcctgatttctaatttgattgcactgtggtgtgagagactgtttgttatgatttctgttcttttcatttgtggaggagtgttttaatttcaattatgtggtcaattttagaataaatgtgatgtggtgctgagaaaaatgtatattctgttgatttggggtgaaaagttctgtagatgtctattaggtccgcttatttcggagctgagttcaagtactgaatatccttgttaattttctgtctcagtgatctgtctaacattgacagtggtgtgttaaattctcccactagtattgtatgggagtctaagtctctttgtaggtctataagaacttgctttatgaatctgggtgctcctatattgggtgcatatatatttaggatagttagctcttcttgttgtgttgatccctttaccattatgtaatgcccttctttgtcctttttcttctttgttgctttaaagtctgtttttatcagagactaggattgcaacccctgcttttttttgctttccatttgcttggtaaagtttcttccatccctttattttgaggctatgtgtgtctttgcacgtgagatacagcacaccaatgggtcttgagtctttatccaacttgccagtctgtgtcttttaattggggcatttagctcatttagatttaaggttaatattgttatatgtgaatttgatcttgtcattatgatgctagctggttattttgcctgttaattgacacagtttcttcatcgtgtcgatggtctttacaatttggtatctttttgcagtggctagtattggtttttcctttccatatttagttctaccttcaggaactcttgtaaggcaggcctcgtggtgacaaaatctctcagcatttccttgtctgtaaaggattttatttctcctttgcttatgaagcttagtttggctggatatgaaattctgggttgaaaattcatttctttaagaatgttgaatattggcccccactctcttctggcttgtaggatttctgcagagagatctgctgttagtctgatgagcttccctttgtgggtaacccagcctttctctctggccgcccttagcattttttccttcatttcaaccttggtgaatctgacaattatgtgtctcggggttgcttttctcgaggagtatcttggtggtgttctctgtatttcctgaatttgaatgttggcctgccttgctagattggggaagttctcctggataatatcctgaagagtgttttccaatttggtttcattctccccttcactttcaggtatatcaatcaaacatagtgttggtcttttcacatagtcccatatttcttgggggctttgttcatccttttcattcttttttctctaatcttgtcttcacactttatctcattaagttgatcttcagtctctgatatccttccttctgcttgatcgattcagctatagataacttgtgtatgcctcatgaagttcttgtgctggtttttcagctccaacaggtcatttatattcttctctaaactgtttattctagttagcaattcatctaacatttttccaaggttcttagcttatttgcattagcgtagaacatgctcctttagcttggaggagtttgttattatccaccttctgaagcctacttctgtgaattcatcaaactcattgtccatccagttttgttcccttgctggcgaggaattgtgatcctttgaaggagtagaggggttctggtttttggaatttgcagcctttttgcactgctttttcctcatcttcgtggatttatctacctttggtctttgatgttggtgaccttcggatggggtttctttgtggacgtcctttttgttgatgttgatggtattcctttctgtttgttagttttccttctaacagtcaggcccctcttctgcaggtctgctggagtttgctggaggtccactccagacccatttgcctaggtatcgctagcggaggctgcagaacagcaaagattgctgcctgttccttcctctggaagcttctccccagaagggcacctgccagaggccagctggagctctcctgtatgaggtgtctgtcgacctctgctggaaggtgtctcccagtcaggaggcatgggtgtgaggaacccgcttgaggaggcagtctgtcccttagcagagtttgagcgctgtgctgggagatccactgctcttttcagagcctgcagacaggaatgtttaagtctgctgaagctgcacccacagccaccccttcccctggtgctctgtcccagggagatgggagttttatatataagcccctgactggtgctgctgcctttctttcagagataccatgcccagagagaaggaatctagagaggcagtctggctacagtggttttgctgagctgcagtgtgctccatccagttcaaacttcctgggggctttgtttacactgtgaggggaaaacctcctactcaagcctcagtaatggtaggacgcccctcccccaaccaagctcaagaaactcaggtggacttcagactgctgtgctgacaactagaaattcaagctagtggatcttagcttgctgggctccgtgggggtgggatctgctgagccagaccacttggttccctggcttcagccccctttccaggggagtgaatggttctttcactggcattcctgatgccactggggtatgaaaaaacactcctgcagctagctcagtgtctgcccaaatggctgcccagctttgtgcttgaaatctagggccctgctggtgtaggcacctgagggagtctcctggtctgcaggttgcagactgtgggaaaagcgtagtatctgggccctgatctgcctatcatcttctatccagcaaaatctggatgatgatataatatattcctttcaacatattacatattttgaatagtaatgaaccattaaatattaatttagtgactattttgtgctaggtattattctagaaataataggaaagtaaggatacaatgactgatagcatagtccctggcttcaaggaggtttgagaaatttgtctggtaaaaggtgacaggtatataaacaaagtgcattacagtgtaataggtattgtgatgaaaatatgtatagagttcagtgcagccacatgggaagtggaataattaatcaagctagagtgtaataaaagcttttattattgaggatcatagaggaaacgtttaccctttaaatttgtcacttattttctttctgattctcttggacctgtgtgtcttttgattgttcaccaaagcaacttcattcctttcattttattataacaccatgggcatctatgactcaatggtatataacaaaatatgtgtgtgcaatactgcctcaaagtacatattactatgatgtgctttataggactcaaggtgaaaatagaatatcattaatgctgaagaagacataatgatctgtgctttatttgttattttgtgtttccaattagtgattatgcacagtctcaagtttgaggttgatcctctcatgcccagccactacaactcttatacacctctgtcagagtgcatggaatgatctcatgggagagcatcttggggagcattatgaactctgaaatgtcctcttcccttgctcctgaagattcatcaaactatatgaaccctgatcttgctgatatcaaggtcttaggctctttctaaatgatagtaatacagaaagttcctgggttatgggaaacacagtttatctagttttatcttctgctaggtttaacagttaattttgagggtgggcctatcataggtattcaagaactacttcaatgcttggttggttggatttagcactttttgacaacagccagtatgaaaatgttcaattttttttccctcctttaaaaacctagcttctcttcccatctttctacttctctttcttccatgctttctttgcttaaatgtgattatcttagtctatgagcttgagggcagggatgctcttctattcatctttaaccaatgtgtttagcaccagtattggcacatggtaggccctcaacatatgcttactgtatgaatgacgcatgtccttcttgtctttgggattaccctagttgctactcttaatgcagtaatagtaagacatctttatgcccccagagtcccaactcctgaccccacttcatgtgagagaattgctttgactccaggtgtttgtatatccactagagggcactgttttgtcagaggctgttctaaacttttcttcaatatcaggatagacaccttaacttcatgggccactctcagcttcaagttcttaatatttctgttaatgaataattctttgagttttccatcacaactattcttgccaatatataatcacaataagaagtcataattaaaaacaatcgtaataatgttagatacaagctaatacttattaatggatatggcaaatacatatttaataaccaaacgtggtaaataagaacactcatatatgttaagggaattcttttatgtttcttgtttccagattttcttctgaccaaaagtagaagggcaagtaaagtagccattaaatctcaaacttcattttttgtactttcacaataaaagcatttgtaaggagactagggaaattccaagctaaacacattatatccaaatttgaaaggtagcttcagtagaaatttgttttaaatgagaaaggcagtattgagtgtgatattttctaaagctataaaaactacattttatgaaaagtttcttctccctccattacttctatttccacagaactatctttaggcagaatcaaatgagttcctgggctttaacgtcaaacagtttgagtttgcaaatattttcaccttacacgtgaatcaacacaggggatatgtgagaagacaaagctgttcacactgtcagcaagcttccaaacacatcattaacccagtggtgacttgggaggtcctactgtagctgtctaaggaagctgcaaaagagggaggagccaacagggagggcctattttcccaagtttaaaatcttaactccgaattatgtcatagaattgaaagagatggtgggacccagtaaaccctgtcaacaattaaagaacagaacgtaaataagaactcttggcgttttcgcacaagaatctttgtgataatctgttagcaaactctcttttacgttatgtttaaggactttttaaaatgtggcatttttttgtgccaggctgcaaagtcatttgtgaagtgtttaattaggcttactttgattaaaaatgtaggcttaaatatctgttgattttgtgacaagctgtggatgttaattgtcttgattggttttattttgtattcttaggacaacaggatcttatgtgtataactgtagttggagaaaggagcaaaagtgtaatttttgaaaggaaacatatatttctgaagttagccagatgttacaagaccacgtacgtaggaggcattgagcctgagacagaaaaacttgaaagatctggtaaagaaattgagcaccccccttaaatttatatccagcagaaatggatgctagtttttttcatgaattttatgtggaatctagagcctatctagattcctactcaataatcccaacatttgtatatttataaatgacaccatttcccttgaatatcatacttcttttccagaggactttaaaacttttaacaaagagagaagacatgtattttcacctatttgatgtagcagattatttacggagccaacatgttgacacactataaactgtaaaaaatgaggcctaataaggttaattgtcatctgaaccttcctctgtaggctgcaatctgtgggctttgattgtttctctgggggaaactctgcccagatggcgaagtcctcaaggccctgacccacaagaggcctgcggagatggagaacaaggtgcttctccacagactaattaatttactagtatagcacctgttccagaatagatagggctggaagggaaagcagtccctgggcacagtggcaagctctcgagtaaatggatttcagctgattatattaagctgctgctttgatcatctaaaggcgttaaaatggaaatatgtttttttctggctgttggctactgtgagtgtggtttgtattattattattatcataaatgttggataatagaaaaggctgttttagatttcaatacatcccacttaaaaagtgcatggtatctttgtgtatttctatttccagtttagaaatgcgtgttgtcataaaactgcaccttttaaacaattctgctttcttgtttccattttattccagccaaattactagctggaaatcaaacaccagcacagattccttttagctggaacattttattatgtactcacacctttaattcaatgtgtgtaattaggctttaatcagctgaacactatttgtgaaaaaataacagacacttctttaaatgaaattctggtaaagtcatgccattaagctttggtgactagttactggcacgaataaatccttgtgtaaacaaggcttggtagtaaatggatttacaatgtgagtctttctgcactcaatttcactttattgcctctttgattcccaaaaggattagagataattttttcagtcctttagatgccataaaactgtttccctttccaaattaacactatgatcttccatgtaatgtgtttggcaaacatgaggaatttataagaccactagtcttacgttgtatagtaatggagataagaatatggtgccttagatgtcatggccttacaatgggaagcttttaccaaggttgtgaatgaggttttgaaaatagaaaagtattcttgattgtatggaacacagcctaaagaatgttaatgattatagctctttggtaagttaaatgatttgaactatttctattaccattgcgagttaatttctcatattgaaacagggaagtgctgttaacattatgacaggcaaaatttagtccttcttttttaagaagatatgacacaggataggaaaccagcaagcacaacaaatttagcatataatcctgaggtttatttccagattgtcctctctcgttgtatccttataatccttggaactatccgttctgtgaaagaaattgaaaatttcatggctgcttttccttggttctcttctctgaaactccaaaagcatccttaaggtgtttttgttttagtggatttatttgttcaatacacattcttttttaaaaatcaaaatgcacagaaacgtgtatagtaaaagtagttcatttactatcttaactcctgaatctggtcccttaatgcagcaccttagattgaccagttcctcacgttgccctccagaggtattttaatggtgcttggtacaaactaaaagacatttgagatatttccagtgatttgcttctataagtaatactgctgttaatatctctgggccaatagtgcaaatgcaactgcagtatatattcctaaaagtaaaatggctggctcatggggcacatgcattttaaatctggataaatattgccaagttgttctccaaatatgatacaggaatgtgactgtttcccaacaaccaggtttgttttctccctaacctgacagttaaatattgtatcttattattttaatttgcatttctttaattatgactgaggttgagtatcttttcaaatgattaaaacccacttgattctcttttgatgtgagcagcttgttcatgtcctttgccagtctctctgttgggccatcaatgttattcttatggggttgaagagctctttatggaaaaaggaaatcagccctctgtctgccaacatgcagtatttgtcatttcggtggcgtttcccttcatatctgtctctcatttaccatgccttctattgctcttcttttatcattggcagtctggatttagggttgcttaataactcctggaaaccagaaatgataatgtcatgggaaaggggttaatttaagtgttttcgtaactttgacttttgatgaagtaggaggataaggactgaaaggacaaaattaaaaagagtgtgaggggactttagtgatttgaaagaggggcttttacactgacaagaccttgaaaaaaatagcgtttatacaaaaaaagcaatttactttacccataattttctgcttttcttttgccattattacaggtatttgtgtcagagtaagaaatctctttctagatgtttttgccataaagtcatatttctgtgttttggacatcgcattttgtggtcataaaatggaagtgattgtaaggccacgtattcagcacaatgaccttgatcctgaatgaagtggagagaggagagagagaacagcgtgactaacagctcttgttgaagcacaagtaactttttatgttccactccacaatgatgaaaaagtaaacacagagacaggttttagatgttgatggctttatatcaaagtgaaatatatttgtcatgttccaaagttaccttcattatcattatttttagaggaatggttaaaagcataggctctggaatcaaacagcttgggttcaaatcttggatctttcacttcttagctgcatgaccttcattaagttctcatctgtaaaaatagggaaaatacgagaaactacttcatgggattgttacaaagataaagtgcaataatgcatgtgtctggcatagagtaagctctttcagtgtcagttagtattagcataattaagtgcagaatgtttgtaaaatgttatctaaattgtactatactcgacctggtttaaagtaagtgaatggatatctgtgaaactttctgacatgtgctaaaatacattgcagccttcattaaatctcatttgaatagtttctgactaaagttacttcatagcatctcccctctctttgcaatttttaccaagccaggttgtttacaggtgaaaatctgatacatagtagtattatctgattgaagttagccatggcaagaagcctcttttatgcttcactagtcttagagtgaacattggctaccctcttgcccctcagtccctattgcatttatgtgtatgttcatgctgttccttctgtttgaaatgctattcctatctttgccatttacatctatatatatacacacacacatatatatatttccccctctatttgtcaaggaaattggtagctacattttattctaagtcacttctgctgatgagcaagaataatgctaagcaatactgctgaattgggtatgaccatccagtattataagggagacaagtgtgtttatgtattagttttaagtgaatgactttcaatcactccaatcaacatttctgatatggatattttcatgtgaaatgattgcttttgtgttggttagttttgcaaatcagaacctatttgcagaacactattagaccaatatatcttatcataatatttgccagtaccacaggttttacaaattagttataatgactgtagttttctattaacatgaagttactgattgactaatttatttactttatgggaattcatatagcacagcgccaatgttctatgactaagggtgagtgcatggattcttgatattaaaaacaactattcattgtacctttttctctggctctgcatgcccagaaagtgcctgatggaaaagattataaaatagttactcaggaaattaattagtaacacttacatacaagatcctgaatcaaaatctactcaatttacaagggttccttcatgagtgactacaacatcaacagaggaagatcactggaattgtggtgcctaatgactttattttttcccagataaacaaatgaaaataaaaactaaataacacttccatctaccaaataggtaaaacttctaaaatagtagtcaatgctggaaaatgcatagatagataccctcatgaatggttggtgaggctgtgtatcagtataacttttctgggaagtaatttggcaagacatattaagagccttgaaatgggcttctcagcaaaatggttaatggagcacacacatctagcctccaggctttgcaggattctgttaaatcaccaatgaaatataaaaattggaaaatgtcagtatctggactatactgctactactactactgatgataaaattctgaacccagaatcccagataacttcaaaaattggaaaatgggtgaggaaaggcaaaggaaaaaataatgcatgctgtttcttatctaatttaggagtcattaaatgttgttcattatggagaaaatcatgtgtgcatgtgtttggatctgagtgtgtgtgttaaaggtaatcactagtaaaataaaaataggataaatgttttccaattactagaaaaaaatatataggaaaaacaaaatggtttatgacataaaaaagaaaaactagatacagaaaaatcagaaaacagataacatttcagttttaactcagggatgtgaactacacgcataagaccaataaaattttataacttaatttttaatttcaaatagtggctataaaagggggtttaagtacagtctggcagccaggaccatgagaagaatcatcctagatgtccacaggcagatgtggctctcacactggggccaagaattttggctgtaagaaatccaagttacccagaatgagtgagtggctttatacctttcagtctagaaggatatacaattaaggagtttcagttaattgccacggaaactgttctgcatatttcaaaatttgaaatatataaatatttgtgtgttaagaagatatctgtgtatatttagtatcttatgtacttggatattgaagttaatttagtttagtagagtctgttcaacatcaaataatattggtccattacagccttgtaacttcaatttaaatgtggtaaattgttaacttgatatgttaaattgagtaagtgatttagacttaaaattttaaattgaaatctaactgaagtttaagtacaatgttggcaaccaaaataatttaattatatttactaatgtaaacattggattttttatttatgtacttaggaagtttcagtttgttaattcagacaactgaagtacttaaaaaaaagaagccaagtacattaaatgtataaatgcagttttaaatgtttgaagttgttaaatatctataaatgggctcagcattaccaaaaaactccttagaaacaactgctaaaatctgccaaacttctaaatataattataaatttcttaagctcaactttaaaacataaggaaaaactagatttttaaaatttatgccttattacattaatataaattttaaaacaaatataaacccaataacaaacatttctgtatttaaaagccaccatcaaggacaacaaaaaattcacattaccagatataataataggtaaaaaatttcaaaagatgacaatattaattgtagaaaaggtaaaattcaagacaagaaacatcaaatgggacaaaagaggccagttaataaaaaactctatggtaaggataaaataattatggaccattacaatgtaaataatagcactaaaatttttttattaaacaaaaacttactaaaatacaaaaaaaaaaaacaaacccagcaaactaacagaaacatgagcgaagaagactttacacagtaacggcagaaggtgtattgaagcctaaagcaagttcatatttttctactctgagttttcactttggaaatctactgtaattatataattggaaatgtaggcaaagctttatatgcaagaatattcattaagttttagtcatagtagtgaaaaattaattactcaaatgtctaacaattgggaaattatcaaatcagggttcttaattgaaaggatctttgaatatctgaagttacatgccaaatttggttgcctattgtaactttcagcagcttcacaaagtaactcatgtccccataatagtaagaataactaaataaaaatttgagcatctacagactgtgactaacacagtcaataaaaatgtttccaaataattttaacaagattaaatgataattttttaaactttccaaatggttttagtaaatgtgatagtaagcattacaaaaatgtttcatacattacatggagtggaaatcagctaaaaaactctccacatatctgacaattgaatgaagaccccacaaagagtgcacgtctgcagacttatacacagagaaagaagtatctatatggaagcttcttacaggcaggaattttgggttgttttcttcactgctgcagactcagcgtctagggtcgtgtctggcatgtagtaaatgctcagtaaatatttctcgaatgactaaatacaattcctcaaagtgttaataatgatgacctaaatgacaagattatgtattctttgctttgtttatatcacgctttccaaattttctataatgtgcctttattacatttagaatgacaaaaatagtttaaaaactggaacaggactcccctattgtgaatctctatactaatgagaaatcttccctttcttcccttaagatttgttttcttgtgtgctttgtgttgatatttgccacctgaaataaatcttatcaccctaccgcttgggagtcttgaatgtttgcaagccaaattttgcttcaaagtccaaaatatggccctaatataacttcccaactgaatctccaactcctaaatgttagaaaatgcccttgccaccttcatttgctgctctcaatatttacttctagggagaatgtgatggataatgcaaaggcactggcatcacccattccaaccaggtggtcatgttgctcatcttacccttgtgttcataatcctgctcattttcacacccaactactccctcatgttttgtgtgaccatcccactccaaaaggaattctctatctgatatcctttagccccctttctgtctgcagattctttagactcttaaccctgtattgttactgttttcctgaaatgtttcataaatgtatgctatgttttccccaacatgctagcaaaccttttcggactggggaaaatgatgcttacttctttatatctcttatcaagcctggtacagggcattacacacagcgggcactaaacacatgtttactgaaaatggctggaagctgtttagttctaacactggtgagaaaagttgaaaaaacagagatttggggtcagacaggctggggttcaaatctaacctctgctggttactatttaactttgtgaccttatgtaaattaatctctgtgagactttaatgtcagtttactgcagtggttataagttcttactctgtcttctcagctgtgtcatttactgtgtgaatttgagaaaattattctccctctctgaacctcagtttcctcattggtgaagtagagaaaacaataccatctagctcataggattagtgggaggattaaatgaaataaagcatggaaaaaccattagcacagtgcggagcacgtgataaagccttgttcaaaatatattagttgttacatgttctcacatataagtgggagctaaccaatgggcacacatggacatagagatggaaatagtagatactggggactccaaaagcggggagggtggagagagggcaagggttgaaaaattacctatcagatacaatgttcactatttgggtacttggtacactagaaacccagtccccaccagtacgtaatatacccatgtaacaaacatgcatatatacttcctaaatctaaatttttttaaagagagtattagttagtattagacatgttagtaatgagtagagtattatatattaaattataagtattagattagtattgaatcacattctagttaagtattagatattagtattagattacattcttgttaaatattagatattaaattagatattagtattaattagtattagatatatcagtagtaagagtatttgtattggatggcacaagatgaaattagatttccgtagcagtgggaaaagaggacccaacagtggtttctaaaaggacaacactttccacgtgagaggcatttggctaggccttgggaggagtttgaagttatttcaacaatgtgggttctataaatatttgctgcctgggaccagttctgtgttaaatctggcagtcctatactagcaagaattgtcccatctaaaatgccagtagcactccattgaaaaaccttgaaagatcttaggctctgtaaggacaaatcagaatgaaaaataagaggctttccagacaatggaatattattcaatggtaaaaagaaatgagctattaagccgtggaaaggcatggcggaatcttaaacgcgtattagtaagtgaaagaaaccaatctgaaaatgctacatactgtatgatttgaacgatatgacattctagaaaaggcaaaactatggagatagtaaaaggatcagtggttgccaggggttagtgaggatggagagatgaataggcaaagcatagaggatttttaaggcagtaaaactattctgtatgatactataatggtagatatatgtcattatatatgtttgtcaaaaccaataggatgtataacacaaagagtgaaccctgatgtaaactctgggctttggatgataatgatgtgtccatgtagcttcatctgttgtaacaaatgtaccgttctggtgtgggatatttatagtaggggaggtggtgtgtatgtggggccagagggtatatgggcaatctctgtaccttccactcaattttgtttgaatctaaaactgctctaaaaagatgaatttattttaaaaatatataatggttgttttggtatttgggaggacagcaatggcaagaaaagacattatttctgaatctactatgtcatagacttcccacgaatgttaaatgagctactgcaaaaggaaatgcttagcatgatagtagctcaataggttctggggcaatcattattttagtttcttgtataatggattagtagtacaatcatgcaccacctaacgactttttagtgaacagtagactgcatacaccacggtagtctcataagattataatggagctgaaatatttctattgccgagtgacatcattgccattgtaacattgtcatagtgcaacacactaccttttctatgtttagatatatttatatacaccaatatttgccattatgttacacttgcttacagtattcagtacaataacatgctgtacatgtttgtagcctaggggcaatgggctacaccttagagcctaggtgcgtagtaggctgtaccgtctaggtttgtgtaagaacactctgtgatatttgcacaataagggaatcactgcatttctcagagcctctccccaccattgagcaacacatgactgtgcctagtttgcagaattgttggttgggttcaatgagaaatgactatactacaagtgattaatagattataatttcccctcaccttccgtaccccacaactaattcttcttgacacctcctgctgtagtcctgaacttctgaagaattgttggggtactctagtcatgtctgaatgtagaaatggtttgtggaaaaatgttggtccccaccgagcatctctatgtgttgtttgaccctcggtggcatttactttgtatgcatcatgactgaagtcataattcagattatagcagaaccaaaacaaatgacaagtcaatagcttgcagatgtagaaaatgaggcccagagaggttctgtgaattatccaaggtcaccacagtatgttatttgtgcagtcttttgtggtgtgtgggcctattttgcctcttttcccctgggcttgtcataactctcacaacccatgtgagacctgcagtgtcctgcagacagctgaaaaatttgcctcctcttctgctggatctctcagaaaatacatttaagtaaaagttttttgcttttatttttttttccaaaactcatgttgttcattaaaatcgctatttaatataaaaaaacaaattaaacgggagggaaaagaaagcatttcttcaatgttttttttccagttgctttttgtgcaggtgggttgctacaggagtcccctcttccaaagcccatctgggatgttagtttagctctattgatgtttaaggctctgtctttcatcgtaaccacatgccaagacaataagtaattgaaccacatgttttgccttttttaaaaggtgtaatctccttctgaagtgtagcgatgtttagcaggatttttctaatttatctgtcatcacaccatgtgggctaggctccaagccttgactgcagtgtctctttatcaccgtcttttgatgaacacctgtttccagcatataaatatatctgctgagaagcaaaattaaaataatttcaacagtataggaataattaggaaccttttttgcaaggtccacctgttccaaatatgaaaacataatatttagttgcatatacattcttttatcactatatattctttatgctagttatgtatatatttggtagtaattctctgatatttcattagctgaaaaaaaattttcacttttagatatttaattgtaagcaattttttaaaaaatcagaatttcttatgcccattaagagacgaaaggaaggaaattactccaaaacttcttaaaataagaaactttaaagtgctccattatttatgtttgttatgctttttgttaaggacttaacttcttcatgaataaaaaaagattatatgaatcctaagttggttataatagatattattttttaaataaaaatatgagtgcccttataagaaaagggtttttttgttaacgttttgtatattaacatatttaaatcaatagatttaatatgaagaattatcgtttttatgattcacatgcatgtctctttatatttaaggctttatccttcatgcttattcttggctttcccatagaccttgagctggatggtttgagacttcaaagtgaaattacatggcaactgaaatccctcacttcaggaggccttcaccaatagtgatccctgtcctattactacatgagaggaattgccattttcaggaattcatactttttacaaaaatattcagagtaagagaacttgctatacaaaaagctgtgtaatgatttaacattagccacgctgttgttcactcagggtaagaagtaactaggtatttatccaaacacccaataaagcaaattcacaggtgagagccaagttgatgtagaaatatattacaatttgtcttcattttcagaatgtgaaatctgaagtgccaaatttttggttgtttttctgacaacatgggaaaaagtaaatcaccagttgcctggccctttcatgcaaagttgtacgtgaggcattatgtgactggttgctttttagcagtcagggacattttgggcaatggttatatacacaagactaattacactaattagtccacaccaatgtgtgagcagtatgcatgtttttacaattaggatgtaattttaaaaaatcatttattgggcacatttagagacacagcagttttggatttaccatacaatagaaaaagaaattatccaaattgaataaatgtgcatttcagcatgggcaaataaattaatatatggctaatgaaacctatgcttgtgtcacaaatatgtacttgcataagaatgatttttctaagcaggtgtatggattgtagcttttgtggtcattaaattatagtgatctaaaaatcactttgcttaatgcaatatggcaacatctcattacttctactagcttttacttctgatgtgggtagttgtgttaggcagaataatgctccccatctcccccaaagatgtctacattctaatccccaaaacctgtaaatttgttactttacatcgcagaaatgcacttagcagatgtggttaagaattttaagatgggaagtttatcctggattatctcagcaagcccactgtaaccacaagggtccttacagatatgaaagagaggcaggagagtcaacgtcagagttgtatgatgtgaggaagactcaccagccattggtggctttgagagtggaggaagaggccacaagccaaggaatgtgggcagcatctagaatttggaaaagtcaaggaaatggattcacccctgaacctccagacaggaatatggctctgctacaccttgattttagtttctgaggccttcagaattatagtaaatttgtgttgttttcagccactaagtttatggtaatttgttatagcagccataggatatgaacacaggttttggttttttggtttttgtttttgcttctcagagcctcagattcctcatctataaactgctaataacatttgcttgctattttttgtaagaattaataatataatgtgtgtgtctttaaaatgatcaaagtcttaaaagataacttttttgtgaaatcagtaaaattatttccacagtaattgattgagaaactctgccagtataaatctccatcatttaaattcttccccaaatccctaagaactagcaattagagcccagcgccgtggctcatgcctgtaatcccagcactttgggaggctgatatgggaagatcacttgaggtcaggagttcgagaacagtccagccaacatggtgaaaccccgtctctaccaaaactacaaaaattagccaggcgtggtggtgcacacttgtaatcccagctacttgggaggctgaggtgggaggatggcttgaacatgggaggcagaggttgcagtgagtctagatcacacgccactgcactccagcctgggcaacagagtgagactctgtcttaaaaaaaagaaaaaaaaggtcactacaaaatatagagtatatccagcttcattagaaagcatctgttggccgggcgcagtggctcatgcctgtaatcccagcactttgggaggccgaggtgggcggataacgaggtcaggagatcgagaccatcctggctaacacggtgaaaccccgtctctactaaaaaaatacaaaaaaattagccgggtgtggtggtgggcgcctgtagtcccagctactctggaggctgaggcaggaggatggtgtgaacccgggaggtggagcttgcagtgagccgagattgccccagtgcactccagcctgggcaacagagcaagactccgtctcacaaaaaaaaaaaaagaaagaaagcatctgttacaacatattgaggcagccagagaaagggattaagtaaatgacctggacagtatgaaaagccacgaacataactgatgtcaacagggcagaaattatcttaatagggctgaggagaggaaaaatagaatcactaaaaagccaagttagattatttacagcaaaaaacagcttaaatgcccattaaacactattttctaaaaagatgggtagataactcttttactcagaggtattcagtgttgaattacttatattagaaaaaaatgaaaaccaatgtaaatgcccaacaattagggaatgattaagtaagatatggtttaacaatagaattaggtgttgtaataaagagtaattgagaaaatcttttaatcacctttggggaaaaacaaatacatatatggactattttatcaactttgtagaaatcccttttaaaatatagtaggaagaaatttacaaataaaaatgttatcagtggttctctctgaatggtaaagtaatgataggtgttttcttttttcagtttttccttttccagtgctctgctctttttttccttttgtcttttttatttttttgagacaggatcttgctttgttgcccaggctggagtgcagtggtgtgattatggctcactgcagccttgacctcctgggctcaaacaatcctcccacctcagtaccttgccccaccacacccagtagctgagactacagatgcatgccaccgcacctaactaatttttaaattttttgtagtgatagagtgtcattatgttgcccaggctgatctcaaactcctggcttaagtgatcctgctgccttggcctcccaaagtgctaggattataggtgtgagccaccgcaccctgcctgaattttctaaagtacatatacattgttttctataatctcctaaaacagcctacattttagaaattatgtcatacttttaagaatatatactttgggagccgtggtggctcaggcctgttgtcctggtgcttaaagaggagaggctaggcattcgaggccagcctgggcaacatagaaagctctgatctgtatttaaaaaaaaaaaaaagaatatatacttttactgggcaagtttattcactgtggccatatcctaattaatgaccatctttttgtcttacttctcatttaatccagtgacatttattagatagctcctttattctgggcactttgctaggtggtgaaaaacataacagtgaataaaatatggtaattgacttttgtaaatttataagctagtgggcagaaaatacaaatacataaacataacaggtttaaggtataaagggaagactatagaaaaataagagaaggtgaggttaggtgctatggaagggggcggggtctcagcagatactttagagatgactagacataaacaaagagacccagggaagatggaagtatgtgcaggtagagatgtaggtacaaatgtaggggaaaagatcaagggcatatctggagaaaaatgaaaattttcagggagttagggtagagtttgggaacaggaaatcataagaggttggaatgaagggggaacaaagagttgaagctaacgagctggaagactaggctggtaaatttggatatcggctttgtctatgctaacttcttgatactaaaccaccaaggtgaaaatttaagaagaaaaggcaggcgatcatctgaatatttgacagcaaggtagttggctaaatgcttacctttcattcgaatgttttagtgtattgaatacacacccatagaacaggtagattcctccactgaaaatgtctcctggatcaggattttaaagaggcaactccattgatctgttcacttgtctcagtcgtaatcccaggataaattttaaggcagtactgtaatttactgtaattcttggattcaaattcagaaccctgagactgaatttgtatatttttctgtattcagccaatatttcccttcccagcttctttaccttttactttgtgtttgctatctgtgccctcagaaaaaccacagctcttcagtgggttagaattgtgtcttctcatgcctgttcttctcttacatttaggaatagaaggataaccacacaggtttttaaataattgattgaaatcctatccatttgtgccaattcatgtgtagcaacacctgctcagcatttagatttaaaggatttctgttgggttcagaaaccattgcctgagatatttagaaggaacatggcaacatcctgagttctccagttttatcttagcattttttgcatttctgctacgtttcctgattgaacatattattaggaataatgtgtttttgcatggctcaaaatttaattctccgttttaaactttcagtataagtgtctggactaagaaaatataatcccttttccttttagatttctttcccacatggtattttaaagtcttttctgcctccatcagatctcttggcagttcacactccattctcttagactctttttaatggcatgttttccaagccttttatcattattactaccctttggattctttccaaattagcaatcttttttatatagaaagagccaaaaattgcatgcagttttccagacggcgctttaggagtatggtgaataatgggataattacttcccacgtgagcttcagtgacacccaaatggattcgtaggcgttctcttttcctttttttttttaatccctaaggatgatgttcactaagaaatgatcaaatcttttattgaggaaaatttaatgaggaaaagttttgctaagtaacaaattaggttatgccaaaatactgataattatctaaaagatggccatttcttttgggaagtattacatttggtggaaatcgtaagctccttctaaatagtatgttttgagtttgatgcagtaatagagagggagtagagaaattcttaaaaatgagagtgatttagagtggggagaacagcatattaacaccacatttaatgatgcagcattgaaacttctatgaaaagtcgcctaggcgataagcagaagtgaaattgacatcagttggcattgcttatttctacagataactagatatgtttattaaacacctactttgtgctgggcattgtcctatatgctagggctatagatgtgaataaaattgtttctaagtatcaaccagattacttcttttttctcctcaaaacactccaatggcttcttctctctctctgtaaaatccacactcctaagtctggtgtacaaggtgccacatgatctgatccccaccaactctctgacccatcacctaccctctcctactcaactcactctgctgtagtcacacaaggcctcagggcctctgcattgaactggaaagctggggttcagggcagcactctgaaatcactcttattaaatctttatgctatgtcaggtaccatgctaaatgcttacagacattgttgcattcaagcttcaccaaagtagaaagatggttattactgcttctattattattatttttatttatttatttatttatttatttatttatttatttatttattttgagatggagtctcgctctgttgcccaggctggagtgcagtggtgcaatctcgactcactacaagctccgcctcccaggttcacgccattctcctgcctcagcctcccgagtagctgggactacaggcgcctgccaccatgcccggctaattttttgtatttttagtagagacggggtttcaccgtgttagccaggatggtcttgatctcttgatctcgtgatctgcccgcctcggcctcccaaagtgctgggattacaggtatgagccaccacgcctggccaactgctcctattatttttattagtagttgttaaatattactaaaaattggtagtgcagctgactcttgaacaatatgggtttgaactgtgtggatccacttaaatacagattttcttctgcctctaccaccctgagacagcaagaccaacccctgcttcttctcctcctcttcagcctactcaatgtgaagacaacaagggtgaagacctttgtgatgattcacttccacttaatgaatagtaaatatattttctcttccttataattttattttctctagcttactttattgtaagaatacaatacataatatgtataacatacaaagtatgtgttaatcaactgtttatattgttggtaaggcttctagtcaacagtatgctgtttgtagataagtttctgaggagtttcttatgaggagttataagttacatgtggatttttgtcaccactcttaaccactacaacgttcagggtcaactgaagtattagaccattattgccatcttattaaagtagagaagttaggtaactagctagtagttggtagaaccagaccattgtgctctaaagatcccctttccttggctggtctgttgaaagactgaactgtggaaaagtctgaatttggtaccacaaagtctgacaattcatccactggattttttttttctttaacagagccttactctgtcccccaggctgcagtgcagtggcacggtcacagcttactgcagtcttgagctcctgggcttaagtgatcctcccacctcagcctctcctgagtagctgggatcataggcacatgccaccttgcccaacaattttttaaaaaaaaaaatttcgtacagatggggtcttgccatgttgcccagactggtcttgaactcctggcctcaagcgatccttctgcctcggcctcccaaattgttggaatttcaggaataagccaccacagctaggctggatcttttattcctatattcaacagagctgctttgagcctcttcttagatgcaaagctcatcagcaaacaaactcctttcttcaaaaaacttttaatttaatttagttattgtatggacggcaatcattcagatgagttccaactcatctgacattgacttaattcaagatggttatttgaacctaagtgtttaatgatcctttcctgatttctgaaataaacaaagaaatataaattaggatgaaaaaattacatcagccctggaaagggagaaaagttaaccaatagaccagaaacttggagtttgtattatgttctacaaatagaattgtataaccttcaatttttggagtgccccagggtgctggtctaggggccttctctcttcagttatacacagtgaaccctgtctctatttattttattttcttttattattattattattattatttttgagatagagtctcactctgtcactgaggctggagtgcagtggcgtgatcttggctcactgcaacctctgcttcctgggttcaagcaattctcctgcctcagcctcctgagtagctgggattacaggtgcacaccaccacacctggctaatttttgtattttttagtagagacaggttttcaccatgttggccaggctggtcttgaactcctgacctcaggtgatctgcccacctcagcctcccaaactgctgggattacaggcgtggtcacagcgcccggcccctatctctatttctgctttaaattttctccagaactctaaacttgtatacccaaatgactagtagatatcactcatggacactcagatgagtatgtcaatttaaattagtcagaacagaactcataattgctgcacccctatcaaacctgtccactccttcagggatttacatttcagtaaataccaccactatttaccaaatcgctggaaaaaaacactctaagtattatatttgattctgctcttgacctcactcccctcaaattcaatccatcagtaagcctatcatctttacatccaaaacatatctggtaacttttcgccatctgcatcatctgtcctggtgatgctcttgctttttctagaatagattcacacacagcagcagagggacattttacaattcaaaatcagatcatgttactccttcccctcaaacaaacaaacaaaacaaagaccaaacacaaacaatccccaaacccccacaatcttaaaactctccaatggctttgcagtgcacttgaaataaactctttattataatttacaaagtcctcctttatctagaccctgccatgttttatcactttctcacttacaacatatgctccagcttctttcaatttttaaaacttactgactctttcccacctcagagtctttctttcctctccctaatatttggagaatcattactgatctttactctgctggctctttctcatcaaatgggtctcacttctatagagcagccttgcctgccctccaaatttaaagtgggcaccccttctctaatttactatgtagtaattgccactggccaaatattttctaatttgtcttttctttcttctcatcttctatgaagaaaaatcccctgaaagcaaggaccatgtctgttttgtttactgcagaattcactctactatgtggtacagagtaggtacttaattaatatttgagtgaatgaataattttattgttcttaatatggtgtgaattgtaacacagatgtaaaaaatgtgtaagataataattataatctaaatgtaaaggtcatttcagcttaatctgagaaataaggtaaggctatataaaagaaacaaaaaaataagatgatagaagcaagaccaaatgatgctacctattgtgataaatctgatgaattaaactccatcattaaacaaatatcttcagattggatctcaaaacataatcaagctacttgttgtttatgagacatacctaaaatagacatagaaacgatgaaaagaaaaggaaggtcaaagaaaaaccaggaaaatataaaaacaatggtagtgatatcagacaaaggaaaagtgaaaaaagcccacatattttaaattgttaaaatatacactcaaattatttcaaccattgtggaagacagtgtggtgattccttaaagacctaaagagagaaataccatttaacccagcaatcccatacctggatatatacctaaaggaacataaattgttctcttataatgacacatgcacgtgtatattcattgcagcactactcacaatagcatatacatggaatcaacctaaatgcccagtaataatagactggataaagaaaatgtggtacacatgcaccatggaatactgtgcagccataaaaaggaatgagatcatgtcctttgaaggaccatggatggagctggagggcattatccttagcaaactaatgcaggaactgaaaaccaaacaccacacgttctcacttgtaagtggaacctaaatgatgagaacacatggacacatagaggggaacaatacacactggggcctttcagagggaggagggtgggaggagggagaggatcaggaaaaataactaattggtactaggcttaatacctgggtgatgaaatactctgtacaacaaacccccatgacacaagtttatctatgcaactaacctgcacatggagccctgaacttaaaagttaaaaataaaatataaaataaaatatatactccgcaaggcacctatatcaatgataccctatgtgcattcactaacataatactgaaacacataaatcgatacatttagaaatttcagattaaaaaaatcataaaagtctcctgcatacctcagaggctttgataagacaaaattgcagaagagctaaactctgtaactgataacattgtttaaatatgtatggaacttcatacaccactaacagagaacactgtgtttcagatagcaaaagaaagttacaaaaattgcaaaaaacatttaaataaacgcccaaaaagtataaatacttattatttgacagtgatgcaatgaaactagaaatttaaaatataaatatatgaagtcacaagaagagtaaatactctatcaaaaatgtttgttaaagaactaaaaactggctgggcgcagtggctcatgcctgtaatcccagcactttgggaggccgaggtcaggggttcaagaccagcccggccaagatagtgaaaccctgtctctactaaagaatacaaaaattagccaggcgtggtggcaggcgcctgtaatcccagctatgcaggaggctgaggcagagaattgcctgaatccgggaggcggaggttgcagtgagccaagatcgacccactgcactccagcctgggcgacagaataagacgccgtctcaaaaaaacaaaaacaaaaacaaaaaaaaaaacaaaaaaaccaaaaactaaaaactttagcaagtaatgaaactaatacatatcaacatttataagatgcagctataaattcacacggaggaaaattcggacctttaaatacttttattattagagaaaaaagtattaatgaactaagcatttgaatgaaatattttaaggccgggcacagtggctcgcgcttgtaatcctagcactttggcaggccgaggtgggcagatcacttgaggtcaggcctggcctgaccagcctggccaacatggtgaaaccctgtctctactaaaaatacaaaaaaaaattagctggccatcgtggtggacacctgtaatcccagctactcaggaggctgaggcaggagaatcacttgaacctgggaggtggagattgcagtgatctgagattgcaccactgtactccagcctgggcaacaagagcggatctccatctcaaaaaagaaaaacaaacaaacaaacagaaaaacagaaagaaactttaaaaggaatcaaagaagcaggaaaaaacatcagatgttactgaagaataaggcagtaattattgaggtaaaaatgaaaaaaattgttgaggttgtaatcctggagttcattcaaaagggccaataagataagcaaacttcagtttatgttgattaaggaaaaataagtaataaaacacaatttctagatatataaatggaaaaggggtgataataagagaaatgtttaaattaaaattatatagcatgtaattctatattaataaaaattaaaactttaatgaaaagataatttccaaggaaagtataaattatttaaattttctaaaaaagagtgaatatgatattcttgtgtaggattgttaaatctatttcatgagtaggcatttttagtgttagtattagttcagtaataactttctccttttcttctatatttttctgtttctatttcttccccaaattctcgaccatagtctaaaaggcttttgtgtaaaagaacttgtttcaactatatttctttgattattattgagacggaaattttaaaaatctgtttattggccattttatgttcactaagtgcctatcattattcactagacaattttctatcaggtagttcattttttttaaatcactttatatatggctagtaaccctttgtctatgtggtaaacatttttttccttaggttaatttatgcctttaattgtttcattgtacttttgtcagtcagaagtttttaatgttagtatagcaaaacatgtcaaactttttctttattttgtgtcccattggaattatagttagaacacctttccatgcctcaggattatgtaaaaattcatctacattttaaagtattggcatattttatattgaatacttgcctttgattcatctgcaatttacttttgtgcgaggtagagataaaactttattttcttcttcatgtatatttagctatttcaatatcactgactgagtgatgctcttatcacttgatatggtttggatatttgtccctctagatctcttgttggaatgtaatccccaatgttggaggtggggcctggtgggaggttttgggatcatgggggcagatccctcatgaaagtcttggtgctgtcctcacgacagtgagtagttctcatgcgatctggttgtttaaaagtgtgtggcacatctcaccttgccctcttgctcccactctcaccatgtgacacgctggctccccctcatcttctgttatgactgtaagctttctgaagcccccaccagaagcagatgccagcaccacaattcctgtccaggctgcagaatgatgagccagttaaacctcttttctttataaattacccagtcttaagtatttctttataaaaatgcaagaatggcctaacacatcaatctattaaaaattgcaccttattagtatgctaatatcttctaaaacagcggtccccaacctttttggtaccagggacccatttcatggaagacagtttttccacagatgggagtaggtatgggatgctttcaggatgacactgttccaccccagataatcattagctagattctcataaggagcatacaacctagatcccttttatgtgcagttcacagtaggattcacgctcctatgagaatctaatgccaatgataatctgacaggaggtggagctcaggaggtaatgcccgcttacctgccgctcacctgctgtgcagcctggttcctaacaggccattgactggtaccagtctgtggccaggagtttggggacacctgttctaaaaaatatactcaaatttttttcttaaattccattaatcagtttaactagtccagcatcagtatcatactctttcaattattattattatgtaatgtgttgtttagtaaaagacatttctccacgtcatttaaaaaacaaccttttttgaccctgggcaacatggtgaaatgtaatcatttcccagaagccccaatttcctattggaaaacagtgtcagaaatatttcttctttagttacatctgtttcatttttaaatagttctatttctacaaaacacacacacacacacacacacacacacacacacacacacactagccagatatggtggcatgcagctctagccccagctactcaggaggctgaggtgggaggatcacccgagcccaagaagtcgaagttgcagtgaacagtgattgcaccactgcactccaacctgggtgacagagtaagaccctgtctcaaaaaatatataacttttttggacatcctttaatcatttttaatgaattttagaaaaaatatcccagaagttgagtggttttattagttttcagaataatttagagataatggacatttttatagtattgagtcttgtgatccaataatattgtatctctatttattcaaacctcttgtatatctgtcagcataattttatagcaaatatataagccacctgaactaataatgctactgtggatcaactcatttacttcagaatgtcctagcaaccgaggcaaaaaggtgggtttgatgaattctgtaattactctctgacaaaaggaaatatgtacattttatgggaagagaaatttttcttccaacttcttaaagaatttagcacagatcaacttaatagctgctagtcatgtgcagccaatatgaaaaaatataattgagaatacatattggggtgatgaagggaatagaagcaggaaagtgagataatcgtacctgataaaattttctggagataaagtctgaattgtacagaacttagaatacttggaagaataaatgaaaacaacatatatccaactttctcctcttatagcaaatcactcaggcttttaccagagtttggatgaagtttcaggctagttgtcagtttctccttgaacaccctataagaacagagctttaagcataagcaatctctgttgatgaatccagggagaccccatgcaaggatgccattttgctatgaaagatgaaggtcccagttatattctccttgatgaagtacctttgtatattagcagtggactaacacagtggatggattagatctgaagtcaatgttttggagtctgcaaatggttggaagctcttcccttcacattatttcacagatattgattgcttctgccctctctgagtgctaatcataatctcatttaatcccacaaagacccatgagtatcattatcaatcccatatgctagatgaggaactgccctattcacacagtgaatcagtgataaaactaagatttaaatttacgttctcatgacaagcaagcctgtaatcccaaccactatcccacatcatctttactcctaaatgtaccaacacttgtacaacccacaatagcagcaatattcactcttggtacaaagaatacattaaagtaagaaatgaggctttgtctacacagtttgaatatatgaacttttgcattttccaattaaataagaagcatttgtcttgttttttaatttttatagaagtcctagaatcttgagtagaataatgcatctgaaactttaatatgcatgtagttcacctggagatcttcaggtggagtccaagagtctgcttgtccaccaacttcaacttcccagaagatgtgatgctgcagtcccacagtccacattttggatggcaagaggctagaggatcatcatcaatctggttttctaaatttgagtcaggatgaagggcagtcttgattagcattcagtacctaatgaatgctaggtagcattcagtacctaatgaatgctaggtagcattcagtacctagcattcgttaggtactgaatgctaatcaagacataatgtctgttcttaaggtaatgcagtgattgtcagctctggttgctcagtgtaatcacagggtgaggttgagatagatatagatagatgagatagatgtagatgagatagattaaaacctctggggctaagatcaaagaggcatggatacttaaatactttaagtatatatatttggattatatccaggctgaggatataaatttgagaaaggtggtagctatattcatcctgactttatcagttactttggacaagttaattaactgctctatgcccatttttttttctaacgtaaaaatggtagttgcacatatctgatggttgaagaattaaatgagaaaagcattatctagaacacaataagcattcatatattagttgtcagtaatagtttcatcattgtcattccaaaattttaggttccttgttccttatatggagtaaatcaccccaaaataaaaaatgagatgtgtatttgtctcataattgcacttctgtcaaacagctctgtaaagcagcatctcatgagagagacaaagcatgaaaaaattaaaagcactttgaatgtaagaataaagatgtaagatgatgacccacctctcattagtaccacctttgaaaccttcctgtgtttatttcctagtctcccttgaacttcatcatttcccagaagccccaatttcctattggaaaacagtgccagaaatatttcttctatgtcttctgtggttacatctgtttcaatatattttttttttttttgagatggagtttcgccctgtcacccaggctggagtgcaatggcatgatctcggctcactgcaacctccgcctcccgggttcaaatgattctcctgcctcagcctcctgagtagctgggattacaggggcatgccaccacgccaagctaatttttatatttttggtagagttggggtttcaccatgttggccaggctggtctcaaacccctgacctcgtgatctgcccaccttggcctcccaaagtgctagccaaaatgtgctctgacttttcattaatgcctgtgccatcccctactcagccttataccacatctacagttactcaataaggacatgactgtaaaaataaatcaaattttaaaaatagattcatgtaagttgttaggagagcttcctatttcaatgaatctgttctttaaatgaaacagattccctttaaaaagtaaacagtccactcagctcatctgtagaaatacaggaaatcatacatcctttcattttgcttactaggtgattatgtggtgacatccatattggtttggagatgttaatgtagaaaacaggtccatttgcttcagattgtaagttgaacattagatttttacctttatttttgttttcagccaggtctgccaatgctgctcttttctacatgtgtgcattgcattgcattcttgttctggctctttttactcttccattctttaggcataattatctttccatgataaaaaagcatacgagactgcttcttccaatagaccacttttatctttcagtcacctctgcttataggaccaatacagtttgaaaatccagctttaatcagtttactgtcaagcaagaaccttcaactgggcttgtggaagtaaacaaaagaactatactcttctcaaaactcaagctcacttctctcttctgtcagtgtgtcacatcaaatgctgggccctctctttaaaagggtccaggacagtcacagaaactcaaatgtggctgtcatattgcagcctcctgtttttcccaaatatacttgttttttgctcatccattgaatcaatcaataagcatttactgagtacttactatgtgctgggcacaaggctggtggagatacagtagtgaaaaagacagacagggtccctgccttcatggagcttacagtttaatgaggcgatagatagtaggcatagaatcatataaatactgaattccaaatagctattaatattataaagaaaaaaattgaagtttatttaagagtatagaaagaagacttaatctggactatggagtcaggtgggtttttttttttttaattaacctaaagctaagcaattaaaagtgagtagaaagtagcagattaagagaagagacaagagacatttagatagaaggacagtcagtgtggaggccccggctatattcaaagggctcagagaaggtaaagatgagaggcggtgaaagatgagtctggagagtcagccagggatcattaattttgttgttgttgttctgtgatagtattgcttggattcttgtagcctgttttctcctccactttttcctatttttgaccttttgtttcactgtattcattcacttattaaattcttttatgactcaaagctttggtgaggaatacttgacttttccatgagctatgttttcttccaggttgggtttttcacctgtcttcagtatgctatgctctatcatttgtttttctcttcttctttgttagatattcatggatatgtttatttgctgtatcttgtttgtaatgctgccttgcaatttctactcttgcctgtgcttaacataagcatttctgtccagacattcatttaccctcaatttgtatggctaagttcttcttatttctttcccattgtatttcagaactattttttttttcctctcccagctacaattagagagttggaatacttctctttggtccatttttctgtagtttgaaagtggtgaggtgagggagtagtagaagaaaactattctgtggccttgaatgacagaactttgctctttttcctaaaatctcattaaatggcctacccagagtttattctaccgtcacagcagaggccctacatttcagaccttgacccttcttcagtgtggaaaccaagaaaacaatagccttggtgctcacctatgtctgctgagctccttggattcacaccagaaggtttcactttgactctttcctgagcaacccactcatctcagtccacatctctactaattggggggcagtagttattaatgaaaattcctgggatttgcagactctccctttccagcttctgcaaggtgaaagatttgttgcaatggtcttctgctttttcttatacattatttttgaaacatatggtgtatggttgtaacccttagctagtttgtttgctgttgacaatttttggaaggttttattttgttattgttggtggttttattttactatttcaagtgttgtgatagcaatattttgcaatcgggcttcatttcactgtctttatttccatattttcatcttcaaaatgccactctagattcctcatgaaaaatgattgaaagggtaaatagagatgtaagaagtgaataaatttaaagtgtgttttggaaacaaaaatcaacagcacttgataaagtgttagatgagatggtgaatgagaggatggcatactgcaggaaaaactgggtgtataaacaatttctaaagacttgtatcatattttcaccttgaagatcttggccaatattagttcacaattcaaacgagaatgagaacaagtatgtactgagtcatcagtgccaactccatgctaaatgcttttgttatctcttcagtcctcaccagatccctgagaaggatctctatgtactctgcctccccagttgtgatagaaatgacacattgtggaggacagggagggccagagtagggggcagtgtgtacagctggaagcaaccccatcatccttgctcaccaccaggcactttcattgactccacctcacttcatcctcatgactaccatatgaaatatatattcttacctctgttttttctaattgagaaaaccaaagatgttaaattaacttgtttgaggttattaagttcatagatggcagaggcaggcttgaaatctaggacttttgatttctccatacctgttttgtttgtttgtttgtttgtttgtttgtttgttttttaccacactctaatgtattatcaaacccctctgccactctgtgggtatgtgcataacaacacatttgatcatcatcaagcccgttttccgtggtttgttgcacatctatttctaactcataaacacagttgtaaaatgagtcaacctgagagaaatcagacttgtttactcattttgcagaaatctgggtttggaggctttcattaccccaaggttagaaaaagaaggctgctattgtagtgatgcaaatgtggttcattgttcaagttggaccgtatccagcaatggattccataagcaccatggcactttcctcctttgcccccattgggtcttatctcctttatcctgggagtgtttgtggcatcttcacttctattgttgagctataggaaggagagggctcatctcagcacttcatttgacaagtccaaaaggaaatcaacaaaagaataaaaaagtgaagtggccttatcaccctactccctcctttggagacattgctgcaatgaatacttttccacaacctggacctttggccttctcacatgcactctaattttctcctggggcacagagatgaaatcacgatgacttcccctggtggatgtgctcagagtggttttacgggtcatgaattagcctatctggggagagaagatcaaaagtaaaattataagtctagagttagtaacttaaaagttctaaacgtgtgtttgtgtgtacatatgtatattatataagagggtgcctttgatgtctaatctgaatgctatgtcaatgtatttgtttataattaggccagacaaaaacaagatagagaaataaagttgtcactgcaggtggctactgatgtgtgacagtgtgttctgcatcaaatcaaatgctgaataagattgaagaggggaaaggcatagagaaaaaggggagaagacactcttgcaaaagaagggagaaacagaagcaatagctccttacatttcctcagaaagggagagtgagaaagcttgattattttctaggaaatggtatgtagaaaggtttggcaggaggtgagtttatgagggaatttgaaagtattaaagggaaaattacttctctgaaaaagcaagaagagtacagagacacaagagccaaggagaagaaagttttgttatgaacatgcttgaagttttgccgacattctggacatatgtaaacagagtgctcaatggaacatctgtctgctgcaggtaactttcttttatgatatattcacgtatggtttgcattttgtttagtttcgaagtttgtgaaacatcttataaaacattcctgctaaagcatgggtacaatgtggacatcaggaaggcatgctcagtagaagaaatagtagaaacacaggtaaagacagtaaaaaaaagggaattggaattacaagaacagtgaggagttctgtttcactggagtataggattcttgatgtggactagaacaggaactagtcagaaattagattggagcagcatcatggaggacttaaatcttagtgtgagatgtacagtttagaatttgttcaatagataattttgttctgagaacccagtgcagttttgagtggatgtgtgacatattcaaaggtgttcgcaggtgtctcatgctctagaaagaagtcaagattaatgacaacaatttcagtgccttttacatagaggtcatatttgaaggcttgggagagattatgtggtccagaaagaaaacatgttagaacagagacttaaagaatgtttacccttttaaataatcaggataagaaaagaggccattgatgacagaggagaaaaagaatctggattgcacattatcgtaggagccaaatgaacagaaagtcttaagaagaaaggatggccaggcgtggtggctcatacctgtaatcccagcactttgagaggccgaggcaagtggatcacctgaggtcgggagttcgagaccagcctcaccaacatggagaaaccccatctctactaaaaatacaaaattagccaggcatggtggtgcatgcctgtagtctcagctactcaggaggctgaggcaagagaatcacttgaacccaggaggcagaggttgcagtgagctgagctcacaccatggcactccagcctgggcaacaagagtgaaattccgtctcaaaaaaaagaagaagaagaagaagaaggaagggtgttttcaaccatactaaaagctgggagtgtgtgcacattaaggagaatgtaaagggagaacagttcatgggtcttgggaatttgttggttcaaaaagcatgatgagttcaagaccacagggaaacacaggtgttgagaggtataaaccaattccttgttccatttctgtaaggacttggaagagatcaacatgttagtaatttaacagaggggaaaggctcttctgggtcaacactaaaatttttaaaaacatacttaacgttaagatgttttaggggaaaaagcgatgaatgctgctgaaagtcagcaagaggcactataattagaagtcatatctagaaacaaacatctgagaggcagtggatttgtccttttgcaagctctaattcttctttttttatttgtagagtggtttttctttaaaaaaaatttaaaataaaagaatgtagagtagaatgagaatgatgaggagatggaccattctgaatttgacatttttgccttttgtggtcatagctaagcctaagtaagtatgagcctgaggctttatttccttgacttctctgccctactaatcaagggctacgtattgaaagtgctgaacaatggaagaatcggaagagggaaaccctttaggactgtaccttttactctatttatgtctatccccaaacctatcgaggcctaaccccttccattattcccaccagtcaagcactattagcggcctcccttgttctttctcatgcaaggaaggagctacagatatgttggcttacagttgacaacttagaggatgatgtttgatgttgagcctgtactttcttttttttctttttttttcgagatggagtctcactctgttgcctaggcgggagtgcagtggcgggatcttggctcactgcaacctccacacctcccaggttcaagcgattctcctgcctcagcctcccgagtagctgggattataggcgcgcaccaccatgcctggctaatttttgtagttttagtagagacagggtttcaccatgttggccaggctggtcttgaactcctgaccttaggtgagccacccacctcagcatcccaaagtgcttatacttactttctgaatataaaataaacttgtcaattatgtggtttttaagagagagacaagggacctttaataaaagacacttctgaggaacgttttcattgtgttaatattttaaattacggtttagtttggaacacattcagaacctatctctacatcgtctttgtctattgaaagatttatatgtttgtatatgtacgtgtatttattcaccgtttcattttgcaggagtaagacttgtgtggttggcctcagtctttccacagacatcttgtaagaggatatggtttccccagtccctttgaagttacatttggccgtatgacatgttttggccaatagaatgtgggtagaagtagtgtaaagcactttcagactgaaggcttaaagcctagtatgtaattcaacccacttctcttccctctatcatggcatctggtaattccccagatggcagcttctgtatctgcctgatcctggagggaggaccacatggaacagagatcccaatcaacccatcattgacatatagcttgagagagaaacattttgttgtaataagccactgagatttgtacctgtggtacagctttcaagaacttgttcttatgggtttaaaaatattcttgattcctgtgactgagtcatattcttggtaaccttcccagcctccagtcctgctacctgctgataccaaacagctgcctgcctgctttttttagcattttattctgcataatgtgttgcaaggctcctaactgcttatgtcaccccagttttatattgtacttatctgacccttgcttatctattacttgttactgcactttccagagatcctcttccctctcatagcctggactacccagaccctatatgtgtgccatcccctaagcatctagctcaccccagtgttttgcttttgccagtttctatggaattagcaatgcccaacaatgtctcttgatgtgattaacctaaatgactctaaactaattgagggtagggttcatgtcagattcaacactgtaaatacctcctgtcttagaacaggtgttctataaacattaaatgaataaatgcacacttgtatcgaatttcattaaaatttattcgagtttattcaaattagagaaagatttccacctgttaagtagattggcttccattgtgtttcaaattaaaccacaaattaaatttaaggtagagtgtcttttggtaaattttatcaaaatcattcaaattttttacaaacaaagcaaaaccagtcattgctgtctgattggacatcaagaggtaaaaccattatttttgcaagcttttgcaagccatttaaaaaatctttagtaattcagtataagtaactgcagaacatacctctggtacatcatattccatctcattggcccatctctgatttcagctgtaattagaacagacagttcagtgcaaatgcttgccttctgctttttgcctcaggctattttccaggtaggagccttctagcaaggtcagaaaccaggaagtgttggtctttactacctcttggaggaaccctcagccaatggatgaagggagacactgaatgcatctcaggcattctgagtactttccaggtggtctggcaaatcaaacccgttttccacagctagaaacttgatattgaacctttatattgacctttcttttttcccatctatcactctcccagctccctgactcctgtttcctggcttaccttcttcatgcaagtccttatttaagactctccttatgggggaacccacactgagaatgtaatactcttatctagtcaagtacacaaatcagcctgtcttgtatagatcttatctgtacttatttcaaagtgaacgttttgtgtttttaaatcttcagtcaattactatgcgcctactatgtgttcaacactgtgcaaagtcttatgagagaacacataggaaaaaaacatgagatttgcagtcagatctggttctagtcttggccttgccaaacactatctagtacttggcaaattacttaaattccctaacgcttgcctataggttagagataataataatgcctctttctgaggaatggggaaaatattgccaacattgtaattattaatgatagtataacacatgtagtctgcattatcaaacttattgtataattatagaacatcatcttgcattgctccctacataaacatactgaaggcatataaaggttgcaaatgcattgaaaccctgtggtgtattttttatgtttttatgctcaaaaatacataacagtgctgaatacatattagtcaattaataaattaatggttgaaaaaattataagatccttgtctagacaagtggcacaattagggtgctcacctttcattttgggttatttgtaaagtgttttctaggtacttgatttatatgttaaagaaattgaatattgttagttttataattgtaaatagaaatcagtttaatcagtttgtgtgtttgtgtttgagagaaggagggaagtgaaaagggagagagagagagaatcaatttgacaatgactgtttacttttccccaagaaactatacctttggtggttaagggaggatgaggtaggagacgaacagtagcatgcagaataaatcactgtcaagtgttagttcattttaagaaccctcgtgaagtaacttagtcaaggttcaaccttgaaatttgaactaattgattcagatggctatcctaagaaacaaagccagcaaaggctaatgggatagaggatgagaatcaacatttgtgccattacaataggttgacctcaggtagtcaattttccaagatattattgaagtaacttggaatttccaaagaatgcagtgctgtctggaaccacacaaaaactagaaatgtgtctctttcgtgatggaaaacaaacgtccttaaaccattcccttctacctggtgggtttatctttgtggtctccgctctctgtgagcaggaacactttacagacattggctgaggtctttggaccagagttagaaccaggctttaaagttagaggggttggtccttccctgtgggcagagccccaagcagcagagacagactcatttctggctgtagcactttttgagtctggtccttggtaagaggagagttgggaggaatagacaaattaaaacagaaataatttaaccctgatgtcaggcttcccagattactgctggtggtatgttagaacattttaagtggtttataaatgaacaattcttacttttaaaatgttatatgtttatttcaatgtttattaagtaccttctatttataaataattgcagttatggaaaattaattaataaaaaggagtgagccaacacaagaaatattgactgctgttcaaagggtgagattcatatgatgtgtgagatgattataggtgctatagcgataaatatttcttaacctctaaaaaattatacctaaaacctttgatagaaacatgaataaaactgtcttaattcttgttgctttataataagtagtgatatctggtaaagcacattttttcactttatttttatttttcaatgtgtcttaactattcttttgtttttatgttttttgttttttccttttcatgtcaattttagaataagcttggtgcgctggcaagctgactctcgggggaaaaaatctttgatttgtagtgtttgcaaatttccatgggggtaaccactcccacagtgggtgatttcaagccacagtggtttaataatcagttcaaagattcctgaatattcaacagtcgggtcccgtgatttggtgtgagctagtatgaactggcgcacctcatgagttggtataagctagctcctacaccccaccaataaccttggccagcattacacatgtacatgtgcacacaacaccactgtaactatttttatttggattgcattgaatttatagaggcttgaagagaattgacatgtttactatagtgagttgttgagcccatgaacatgatatatttctgcatttacttaggtcttcttcagtttttctcagtgatactttatcagttcatttttcctttcttcttcgtagtcttttttcgtgatgtcctactcatcttctttatatttatatataatatttacatataatatatgtatatttatatataatatttacatataatatatgtatatttatattatatttacatataatattatatgtatatttatatttacatataatattatatgtatatttatattatatttacatataatattatatgtatatttatattatatttacatataatattatatgtatatttatattatatttacatataatattatatgtatattatattatatttacatataatatatgtatatttatattatatttacatataatatatgtatatttatattatagttacatataatattatatgtatatttatattatagttacatataatatgtatatttatattatagttacatataatattatatgtatatttatattatagttacatataatattatatgtatatttatattatagttacatataatattatatgtatatttatattatagttacatataatattatatgtatatttatattatagttacatataatattatatgtatatttatattatagttacatataatattatatgtatatttatattatagttacatataatattatatgtatatttatattatagttacatataatattatatgtatatttatattatagttacatataatattatatgtatatttatattatagttacatataatattatatgtatatttatattatagttacatataatattatatgtatatttatattatagttacatataatattatatgtatatttatattatagttacatataatattatatgtatatttatattatagttacatataatattatatgtatatttatattatagttacatataatattatatgtatatttatattatagttacatataacatttatatataaatgtaaactttttaagttttgttttttaaatatttgttgctggcataaaaagtgtacttcttttttttaaaaaaaggttatattaacctatagtcaacgttcttctgtaacccatatatacattttgaaattttatatatacctttttttggatttttttaatgtaagcagtcatacttttgtgtgaataatatttttattttttctttttaaatccattgcttatatttcttcttgccttgtcacattgtgtacctatacaatgttaaataaaatgagtgactgctggcattctagtccaaattcagatttcaaagtaaaagctttcaacatttactattaagctgatgttttcatatagaaattttgttgttgtttgacttgtttgtgtttatttgtttttttacatgccctttattgaattaaggaagctccctcctggtttagtttgccaagggtttttacttatgaattgttgctgaattttatcaaatgccttttctccatctagttagatcatatgacttttttcttttttatgctaatgtaaagaattacaccaatcactgttttaatataccaatctcaagttcctaggtaaactagtaagtgcatattactggtttcagtttgctagcaatttgtttgaaattcttatatctatagtcattagtgtgattatctgtaattttttctcttaatatccttgttagattttaatatcaaagttattctggtcttgttaaagaagatacagtatgttcccctttctgtagcctctggaagagtttgaatttatttcttccttaaatgtttggttgaattcactattaaataaaaagagtaatatgaaagagtataggactattcaagttttatatttcctcttgtgttagttttgtaaagtaatattgttagacattttcattgtcaacattttcaagttcatttgggaaaaagttgttcatgatctcttgtaatcttacaatgtctatacaatctgtagtgatgttttgtttttattactatttgtgccttttccttttttcttcattaatagcaatgtacgtatttggattttactaattttctcaaaggaacaatacctgaatttcattgattttctctattgttcagtttcaatatcattgctttctgctgttaactttatttcttcttctttctattttctttggatcttgttttgttgtcttctaattttttgagatagatgcatagtttattgattatgaaattttaaaaaatacatacttccaacacactaaagttttttcctacatgacttttgctgcatcctagatattttgatatttagtaatttcattattttataataataataatagagacagggtctcactgtgttgcctagtctggtcttgaactcctgggctcaagcgattctcctgcctctgcctattattttataattttcaatatgttctcttcattgaatcatggcttacttgaacacgcaagaatattccagcaacatttttttttcaatttccaacttaattactttgtaaccacagatatactctataacttcagttctttaaaatttgtagaacctcaatttgtggccaattatataataaatttttgtaatgttccaatgtacttgaaaaaatgtgtattttttaggtttaaaatatagccttttatgcatattaattaggtcatttgctttctgtgttattctactgtatcctaattgattttctgtctgcttgcttaattgttataaagagatacatgttataatcttacactataattgtgggtttctctatctctttttgctgtcaattgttgctttatttgaaggcgattttattagatacatacaaatacagaattgttatcaaatgtccttttaactttttgcttaaacaccactttatatgatattatggttacactgatttttgtttggcaaatattttacatccttttatgtctatatattttatacatgtctcttgtaaacagaatcataattttaaaatgcagttagtgatgtttgtctttataggtttagaaattggaatacttagtctgtttatatttatgtaattactgatatgtttgaacttaaatctaccattctgttgtgtcctttctgtttccttaccgctttgcttttttcctcttttttctagcctttgtttagatagataatttttcaaattattccatattccctctatttcctcaaaagctatatactcttactattctttctgtagttagtctagaaattatagcatatgctttttacttatcaaaatctaatactaactggttatttgaaactctacccagatgatgcaaatagataaaaaatattagaataatttaattttatttattcctattttaatttgaataatttaattccatttattctccattttgaaataaatatcattagtttgtattttatgtatacatattaaaaactcaacgaaacactgttgtgattctttgcatggtcaataattattttgatttactcacttactagctgttgtggccacacgttagaagtgggatggcacctcacccaaattttggtttggaggttgaaagtgattatgctacacacatatcaagagaatatgaaaaagtttattagtctggggagagcaggacagacctcccaaattagtccaaagatatcttgagagattaggaaaaggagactggtttttatggtaattagagagtaggtctgggatgagggttcttctgcataagtagaggtttgcatggtttaaatatttcactggcatcaaaggagggagtacccaggcttttttattagcttgctcagacgtggaacggaagaagagggagggaatgaagcttaaaagctttcagcagtcaaacatcaaaacatggagccagacgccttattacattagtgtttccattgcttttcaattcttcctacctttccaggctttcctgtggattgttttccttctgcctaaagaatattgtgtagtatttattttaacatgtctgttactggggaattatctcatgtgttaatctaaaaagatgtttttttaccatcaatttcagaagatataaaaatgacagatgttttctttaacactttgaagatatcatttcattgctaggtgaggtcctttgtttctgctgagcagttaactgtctgtctattgttgcccttttaaagataacgtctttctatgactgactttaaaattttttctccattttggggtttccacatttttatcatttagcatctcagtgtagatttgtttttcagctattcttcctggtatttgtgtggttcttaaatctgtaaatctgtagcttgatgtcattctccagttttagaaagttctcagctattctcacttcaaaatttgtttcagcctgattatatctctcctctttttcttcagccttatttctctcttttctttttagaactcaaaatattagaaattctcactgtatcctctacatcttttaccttcttctctgtattttctatcattttattttgacagatattgctgagaatattccagttaagtatctccgtaattgtatatgatctattagacccatcaatttaatttttaatttcagttcttgttttcagatttagagtttctgtttacttttttctttgcaaaaaaaattgttaatcttgtcttttatcttctagaacatggtaagcaaatatattttattatattatatcatattattattattttgagacggagtttcactcttgttgcccaggctggagtgcagtggcagaatcccggctcactgtaaccttcgcctcccaggttgaagtgattctcccacctcagcctccgatgtagctggaactacaggcgcctaccatcatgcccagctaatttttgtatttttagtagagatggggtttcaccatgttggccaggctggtctccaactcctgacctcaggtgatccgcccgcctcggcctcccggagtgctgggattacaggcgtgaaccacaaagtctttgtctaattatgacaattttggaagcccttatggaataattctattgctggtggtttctgctaggttttgctcatcttgtcttgctcctcattgagctgtttaaaaaagttgtgccaaacattatattatagcttaaaattgcttctagaaataatttggtgcccaagataatgttattttccttcagaaaggcatctgagggattctgcaaaccatccaggggtacaagccctcctgaatgcctgaaggctctagcaatctggcattattttaattttacttcaaggattaagataattcaagactgagctgcaagaacttgtctacttcctgtttaccctgttccttaaaatatattcctttgtggttttatccccaaacaggagtgtttattatgtctactcatcatctttcaataagattagcccataatttaccctttctatattgcttttcccttcacacttgtttttaatataaaaactgtcttattatgttatatatatagtacttttttttttgtattttactttggactagaaacatttcttaaaacttgtaaaaccatatgcagcttccagaccctaagccatccacttactttgccactttcacttgaaattttgacatttttgttttgaaaatgttttgaaaattttgacaaatgttctaaatttagacaaacagccctatcatataaccttcaatcagagaactctatagggttctaaatcaattcctatattaaacttatagttaaaaagagaaatcagtaagaaaagtacctaagagattccagccaactgaaaaacaaggataagaattatctgctcctaagtcatattctttgtttttgatgcaaccaagttgtttgctagatatatatcctgttaccttattcgctaccacctctgaaaactgttgcatcgaagccttgcccataccagtgttctatgaataattttgatattaaaaagtttatagaagttgcatcataaaaaataaaacagaagacaaagccaaaaattgatcatttgaaaagatcagtaaaacagatatgcctctaggaagattaattaagaaaaagcaaaatgagaagggacagataaataaaacataaggattaaaaagaggatataactatggataaaacagaaatttaaaagtaaataagaggatacagtgaagaactttattctaagaagtttgaagacttaagtaaaagaagagaaaatttaaaattttattttattggaacagactcagaaggactgcagaactacataggtcaatggccatacaaaaattaaatcaacaatcaataatctttagaaaaaaaagagacagacctaggttgttaagtatcttctgatgaatttgtaagcaacagacaattccaattttctatccataggttacaaaaatatgaaatgctcattaacacattttatgaagctggtatagatttaatattgaaaacaatgataaggggtagaataatacaagaagggcaaattataggcagatctccctcaaatatgctaggatcctaaataaaatattctcaaactatttccacccatatataaaagattaaaaaccattaccaagttaaatatatccataaatataaggttaatataatgctagaaaaatataatatatataaaaatatatagtttgtcatgtttacagcataaaggagaaaaagaaaaaactacaacaaacatgatgtttaatggtgaaatgttgaaagcataagtaaatcagaaaaagaaattaatacaatacaataaaaggcaagaggattgggaagcaagaaacaaagctgctcttatttacaggtgatgtaactctttaaaaataaatctgaaacaaactttttgtattagtaggggattttggaaaggttaccaaatataagatcaatgcgcaagaatctattccatttttaaataattagaaattataattttggctgggtttggtggctcattcctgtaatcccaccactttgggaagctgaggagggaggatcacttgagccctggcatttaaagccagcctgggcaacatagcaagaccccatctctacaaaaaataataagaaaattagctgggtatagtggcacacacctgtagtgccagctacttgggaggctgagatggaaagatcacttgagcccaaaaggtggatggaggctacagtgagctgtgatcacagcactgcaatccagcctgggtgacagaatgatactctgtctcaaaaaaaagaaagaaagaaattgtaatttaaaaataggatacaataaaagttaggtatacaattgattttcaagttgaaaaaataaaatttaatttatatctcacaccatacacataaataaataaatttttagtggattaaagacttcataatgaaaagcagaattttaaaattctcatgagaaaatttggtactatttttatgaccttgatgtaggcaagaattatttatacaagatatataaaaagcactaactacaaaggaaaatactgacggacttgtctacattaaaatttaaaacttctattcatcaaaaacaccatttcaagagtagaagatcaagccatatcataatttgaagaatatatttggaacacatgcaacgaacaaaagaatagtattgaaaatgtatacatatttttaaatggctcctaacaatcaatacaaaaattacaaataattcaataaaaatatctgccagagggatatatagacatttcacagaagaggacatatgaatgtcccacagacaaaagcaatatgtgaacagagaaagacaaatataagtctcagtgagatacctacttggctggcaattgtgttgaagtctgacaataccaagtgctgtcaagagtgtgaaacaatgggaatccttaaatattcctggctgaaaaaaaaattggtataattgcagtataaaacaaattcagcattatttaatacattttaagatatgtaaaactatgtaactaaaaaattttcttccttgcatatattctaaaaaacattttcatgtgtccattggaagacatacctgtttttttcagcatgatgtaaaatagcaaaaacctggaaactgctataataggtaaattttcatatatttataacaatggaatactataaagcagtgatgactaaacaacatcatacacattaacacggatgaaagtcatgaataaaatcttgaactctaaaaatgttacataataatacatattttatgatttttaaatataaagttaaaaaacatgtaaagcaatataatatgttcagggactatgactgatcatactgtttactcaaaatattcactatcctttttacttttgttgtgggtagcacttcctacaatactgatgtccgtctcagccatgtgactgattttggtcaagaaagtgttagcagatgcaataaatgtcacttctgagaagaagcattaagaattatcagtcacatggttctactgtcaccctcctctgtctgccacaaacatggtatgttctggtgtaaggctactcttttcatcctagattctggaagaggacataggaaataaagcttcaaacaatccaccaccaactatgtaatgtgagcaagaaataatttttggttttgtaaacaattgatatttacataattattacctcaaagtcaatgctaccataacaaaacttctaaaacatgtgcaactggctttgtggcagagtggtaggtagcaaagaaactgattttagaggataaaacatggcaatctattatgcagtggtgaaacacttaatgaaactttagctgcaataacatgcaaagcagataatatattgaatgaccgtgtgactttaggtagggagattggaagacagaatagtactagcatgtcttggttgctgttggctgcattcgacatggtggtacagaaaaactaggagcccacaaaagaattgaccaatttgtaagaaaagatgaaaagaaactaaaggaggtcagaaagttggggacctagaagtttgaaagattcaacttattctcacatccaaagtaaaactaagaatatttttgagtgacaaaagctgattaaaactcagtttgcgggaggcatagaccaaatccaggatatcaggagtgccttttgtttagttgattatagtggcaactggtaaatcttttcaggtgtgcaaaatggctcaaaagaggctaatggtgtagctcctccacggaagtctggtaagctcaaaaatatcaatttaaatctggagaaagaaaggcatgtcttaaatggaattgaatttgttgagaggatcatacaacccaaggagccatcaacctagattgacagagactgtgtctgttctaagtctaaaagctggaagcaagaaaatcttagcctccaagggacagtattttccagtgcccttttcagatgtggcccagtgaggataatagaaaaggaagaaccgcccagagggtggagccaagagtcatctataaccatgcactgtggtgctagtcacagagaacagaatgagcctaatcaagaagtatttcttctgcccatgttagagggccttcacaatgtttgcccagtgggatttcagaattgctatttttggcacataggttttagttttagttcatttgtctctaggtgaagaagagctgtatctggacctgatgttaaagctaggacaaaatcctagtcctggaatctaatgctgtggttgaatacatcctttcagctatttacttggaagatgggggattatgttattgtgtagaagggcaagaaatgaattttcatgcccaagagaacagactatggtcaattttattattgcttcccactattcaccatcatttcttgtaagggaattatgcatccttgtcctttgccatgtacctttattttccttctctgtgatacagattctccattgataaaaggtttgaccaatgaaacatgatgtgatgtgtttccaacagaagttttaagagccatcacatggttctgcactgctctttttcttttacaatgagactgagataggggctattcctttagcctgagtcttggagtgaggaaaacaccaagcagtagcaacactgacccacagagacacagccaacctgcacatagtatgtacttgagaaagaaatcagttattggcatatattgtcactgtagcataacttagcaaaagcagactgagaaaggaatatgcataagtaagaaaactgagaggaaaagcaaggaaattttaaacacaaagtttgggataagagttacctttagtggagggcaggagaatacaaggaggaacacatgggatatttcttaagtttggtggtgtgtatgggtgtttgtttttatcattcttttactttgcatatacttcagatagattgtattatatatagtgtatgagcatgcatgcatgtacagtcagctgtccatatccatggatggagaaccttgggatatagagggtcgactgtaaggaacttgagcatctatgaattttgttatttggaaagtggtaaggggaggatgagagccctggaagcaattccccctagataccaagggattactatatgtacatacctatatatattacatatataaaaatatttcatatgtgtagatacaatctattgtatccctttataattataatatggaaaaaatatagcaaacctataaagtaataaatctaccaaatactttgacctctgtttcttccaaaaaccacactaaaatgacagtagaaagactaaaacaacataaagagagggaaaatgagagacgagaaataataaaattttaacagtccagagaaagccagaatgtagactggctgcttgggaagcccagattcaagatgatttaaatcaaattactccagaaaaacttgggaattgtaggcacaatgtctctctgaatatttgtgttcagctaatgctaaaaacaggagaattaaaaatcctgtaatttgcaacttctcccctctacccaaaccctatcctctccttcacctcaagcaagctgttacagctgcttctccaccctgcagaagactggaggtttaattctaaagatgttgaactacagcacatcggacagagttgatcacagaaatatcattctgaaaaacagggagatcaaataacaattcacagtgaaaaatgttcctctagtttttaatttattgaatgccagaattactctgaaagaacaagcaagtaatcctacaaagagaataaagtgattattcttctagggctgtgacaactcctaaaatgtgaatatgtgggcaatccccaattcggtcattcaaaaaaaatatttcttgagtggctactacatggcaagaactgccttaagcagagaaaaaaattgtcccttactcgctcaagaggtgagcattggagaggatgggtggacgttaaacaaatctgcacattttaatcaattatgaatataataaaagtgctccgttagtgaaccaaccattctggtaaatatttcatatgtaacaaaatatttaacaactgctattgcatggatgccaaccatcagaatggacaccagctatgaacagcctgtctggtcattccagtgcctcccagctaaatagcatcgttgaatacagtaatagcctctcactcaaagtttagtcatttcaattttattattaaaattggaaaaatagaagactcctagggagaatgcttgtctaaaaggccatacctgtgacattaaaaacagctaaattataatgccattcttgaggtcagatgacatgtcattttagttaaacccaattcactcaactaatttaccacacctgtagggtggatgcagatgaatacggaacagtagaaatcatcatcaaaacctggattattagacgactgaacaattctacaatgctcattgtgttttacaaaatgttaaaattattattttagggggtaggaatgagagtcagcagtcagcaaaatgccgaatgcagctttttgagatgaaaatattaagaccaggagctaatacagaggttttttttttcccctccttaactgcaggatttggggttttaaatttggattatggaagtgaggaagggtaggggtcttaaagagggtttaaagaaatcacctacagagtagaggtttaaaaagagtcctctgtgttctgaattcttcgagggtatctatcttgtacaaagcagcttttttctttccttgccctgctctttctgcctccctcgtgctctttctctcccctatcccccagtccaaacttcaaggtgacctcctcctcgtggtgggtaaatgatggatgagagggaccacccggctgggcctaccacactgcaagtgccacccgggtcctgtagggttcagtaaggcccccccatttagaacgctttgtattttttgttacaattgttctcccagcaatggatgaaaaacatagcatgaacaatagagctgtatgagatttaaaatatctgaatacataataatttcacccagctttcagaaaaaaactaaaaagtaaataacaaaaaccactcctcagaatgtgtgaacctaaattttcggtcactttggaagcattttcttctttttctggtttttcattatctaggccacttggcaataaaatagcatttaattatacataaacgtgagaactctagtgagagaatatgggttgtgatctagtcagaactagtttgaggccagaaattgttcattctcaatgccgtcattcttacctgcttttccactgtttattttttacctatattttcccatgcagttttttctcaattttaaaaaattttttgaagatggtcttcattttctattccccttcattattttctctttcaaaagtcccacctttactaaggtacaagtcattccattgcaggaaaaaaaaaaagaaaaaaaaaaagaaaactattttgttcagaaaataagtacccaaaattgtttgtttgtttttttttttttctttagcaatgtaacttgtagtcgcattaatgagatcacattttatagtggaaggtacttttagggaaagtatgatgacatatgttccatttaaacctgaagcttttcctggaaatgtattgtggacttcatttgaataaaatgcttccgatgaatctgttgctccttacagattttgagaaagtaccttgttcttcctgtcagtggcaggcagcatctctttaatttttttttccaataatattgcagtactctagtactcattttaaagatagatggatttttttttctcttgtaaagaagaacattgtgggggataaaacgctggatgtgatttcaaaaaatgtcaaaatatgtcaaacgcagataccactcaagggtttcattaactgaagctttggtgataagtgtcatcttgtcaaagacccacccatctcttccaatacattaccaaatgtactaatttccttgccgagcttgatgtttattgtatagctgaaattgaaaatggtcggtaatggagtgagcttcaatccaagaccaattctgaatctaaattacttgcttctttcaatagcatcgacagaggagagctttatgcaccttgtacctaatcaacccttactgtgaccctaaattcagcagtcttcagagattaataataaaatcctcagttcaaacaattatttgccctgaacaagttgcccatttcttatgctgagaatgaaagaatgtgacattattttttaaaagctctgcatgttgtgggccaccatttatttttgatctctgacccccctgatgcagtctgattgcaaatcccacatgcttacttgaatatttttttggtgttgggggggtagttgtgagatttctttgttagcattttaacgtgcctgttcttccacatcccctaacagttgtggttttcataaagtaaacaagatacattctatcaatatgtatttctaaagtttttaatatagagctctataaatcatggaaagcatgatcgaattctagttttgtacaaaactactcagagtctctagaaaataaaaacaaactccctggaaaaatcaattatttatctactttctcaaataaaaaatttaattcaaagaatgtcttattgaggcttaaaccctaaatgattttttaatgaaatgttttctactccattccagttggcagtgtagcttatagttcttgagtgaagttatctaagcaatatcaaattcttttagtcatctttacaatgaaaaacattcattcatattcaatgccagagcatttttttctaatttggtatcttcaacttccttatgtccaattagtattcattagtgtaattatgatgatggaaaggctcagtccctgttcttcaagacattaggaagtttggggaaagccttgaaacaaaatagtaaaagaaatatttggacatcccaaatgcttctttgattcaatactgtgatttgattcatcagtgaaggttggttctatgtccaggagcttgctgggggagggaagagacccatagtggcttgctgccctagaaactctgcctgccattgtcaacatttcctccggctgtcttgcttttggagggaaactctccctaaggactgccctggttgacagaatgagagtctccagaagattcttctgccatttgaatgcatttttttatgcccaacagcaataatggccatctaagtattgattatataatatgtctgctgaggtggcaagtacgttgtcgttgcaagaggccgagaggatgagaaactaggttatctatgaactctctcagccattgagcatttcttccggtaagggtcaatatacaaagctatctttagatgttattttactttattctctgattccaattgatggctaatacaatgagatggccagcatgtttcaagttctttgaaaacagcctcatgtttaccatggaatgggcataatcatttcatcacaaggggacaatagtcgtatggaggtctgcgacatgaggaaggctaggaattgcccagggtgttgccctattagagtcccagatgctaattagcagcaatgaattggttaagtaggcattgaaaggcagttagggcataatctaatactttttctttcatccaaaaaaatacaatagatgatatatagtaagtctgctgtgtatagtaacagcaataagggcactgagcttttattataaactgaattacatcccctgtgtggggacactagacagcctatcgtgtattaagaattcagctgagatcacaagcttgcctcacctaaaccttctgtgatgtgatgagaatgacttttggttaccgtacatcaaagagggtctagcaggctaaacagtgattgatccattctcctctttcaagtcctctcttcaaaaatagctttaaagcaatcatctaataagtgtcagaatagaagatagaaaatgttagtacaagcactaggcatatgtctacactagctaaattttctgcaagatgttcaatgactgaacaaggtttttagagtaaatgctatcatctcttaagagatgagaaataccaagtgggctgccactgacatggaaacaatacagagatttaaagtgatttgaggcaaaaataccatgatttgctcgactagtagagaattctgttaggacaattttgaaataattttatttatacacaaaatctggtataggaattagcttcttgcttatgcacacagaagcaatagtattttcacaatattcattcacaaaaatatgtttattaagtgtgcttatataagatgaaagcttagttaaaggaatcagccatatgagtgacccagtatggtgatcattagagctgttcacaaatattctgatgctctttatcttccctgctctctttgaagtcaggtctagtgatatgacttgctttggacaatgagatgtgagacaaaatgacctgtgtcactttggatggaaacgttaagagctagtggaagatttgccacgtccctgttcccctgtattgatgactgtgggagcatgtgtcaaggtggcacttcctttggcatgggtttctgagtcattagtatgagcagacctccctgctggcctgtactgatcccgtagcgtgagcaagaaatgaacctgtaatgtgttaaaccactgaggttttggagctgcttgttaccacaccataacctttattcatccaggcaacaaatactcataattacacactatgtgccaggcagagtacacagagataacaaataattgctgatcgtggtttgatgtgccacccttcgttacctgtttgctacatccttgaggagtagatgaaaaataagcctgcattaatataactaatcaagataaattgatctaagattgtaagaggtgacaaatccatacaggtctgcagcaacctcaattcttgcctcttcgaaaaaaagaattcaactgaggggcaaaaagcagaaggagagactgaggcaagtttcagagcaggagtgaaagtttattaaacaactttagagctggaatgaaaggaagtaaagtacacttggaagagggccaagcaggcaacttgagaaatcaagtgcacagtctgactttttgacctggggttttatacgctggcatgcttctggggtcttgtgttacttctcccctgattcttcccttggggtggactgttgacatgtgcagtggcctgtcggcacttgggagggcccacatgcacagcgtgttacctgaaattgggcacatgctcacttgaggcattcccttatcagttgagtgtttctagagtagggtcatataccagttaaactctgccattttgcctcttagtgagcatgcttgtgcccactcacccaactcttgagatcttatcaggaagctgctgatcaccagtttcagattttttctgtctattggaagactgcctttccctggtactggctgtaatcaattcttattttagagagacaattaacaaccacctgaccatgacctgatggtcacctaatgattctggttgggggtcgggagtgggcactcctgccctgctcatgtctgactagctacgtactgtaacaagattagtgatgtttcgacagtttttgaatgaatgacattgtttcagaggacactttattggagaaaaagaaagactcatttcaaaagccctgagatttcttatactggccaaaaaaaaaaattctgttatttttaacttctacaatccagccattccccaaccacactgggcactttccaggtatgtgcgcttggctcggactgtgccctccacctcgtacactcttctcaaccccgtctcatccttcaaagacccattcaaatgccttctcttccatgaaattttcctttctctccctcttcacagcatcaagttacatacctctactgagtgcttatttcagtctgcgttgcattatgattattgtttacatgacataacttcctgcacaagatggccccctatcctcctaaagcttatacattcattgtgagtacaggctttgttttattctacgttatgtatctccaatctgactctcctctccacagcttaataaatgttaattgatgtttgaatagatttgagagatttgtttgggtgtaatcatggatttctcaaaacatgtaactgccctggtttggaatattgaagaaacaaagaaaccctttcagctctaagaaggggagttgtgaagctgatacttttggctactcctgggggaattagttctctcttggccaaggaccaaagcctgcctcctgaacacccatcacacttaactaatttccattctccccagggaccaagacagtaagacaaaagaggaaggaagtaggcatttcagaagagtaactcacccacaaagagccatttgaaagggagaaatgaggaggggagtaagaagtcagtgttaaaagaaaaaaagtcactaaatgaatgcagattttagattacatttccttatccatcttctctgcatcataccaataactttcttgacttgctaactttccccaggacaagtcctgttgctcaaagcttgctgccactggagtaggcatcagaaacccccagtgtttgtgtcaaagatgttgagctattatgttcagtctctctcttttcctttctgctttttgcccttccttactccaccccagcatccagaagccaagacatcagctcctctctgaaagtttaaccccatgagtaataaataagatagagaagcatgtgcttttctccaccggtttatcagccatcctgacctattacctattcaacactgtcactttccagcctttcatttttctgtgagacagtgagaaaaccaatgactttgcatcaaatagatgaaggattacatcccagctcttccacaaactttccttaagtacctcagaatttacttgactatttagcctcagtttcataatcttataaaatagagttggttacacctgtgtaaaacaattgttataaggatgggtgggataaaacgtaaagtcttcggcacatagttggtgcttaatgaatcttactattgttactaataaatatttctcaaacatatttcctcctcttcatgatcttcctgctacaatgatcttatttgtgttctaattttctcatgtctatatgcaagaccgcttaagtgatctttctaaaactagaaatcagagcagggcatcttcacacaaagccctgtcatacttccaaaactacagaagcccttccagttattcttaaggatctacagcaacaacaaaaaaaatcttaactcagtgtagcacatgagggctgcagctatctggcatctgtgtctaatctctttgcccattattcccttaattgtaactgtaagagattgtttttctaacaacttccaatgaatcacaccttccaggctccccatgctgttgcagttccctcccacactgaggctgagcttggccatgtgacttgcttggccactaggacatcagcacatgtgacacaatcagaggcttgagaaatgcttacacattggggcttgccctcttgaaactctgttggcaccatgtgaagaagtgcagcctggtccagcctccatgaatatgctcttaaagagagatgcccagccatcccagatgtcccagctgagcctagtctcagccaatctcctagctgaatgcagctgcatgagtgtacccaggcaaagctagaatgaaaattgtccagccaactcacccaatagtgagaaatattaaaagcgttgttttaagctgttatgtagtttgttacaccgaaatggataactgatatagtgccttttatctccaaaataatgagcaactatagttctatgaaaacatcattttctgtcacacctcacattcctttgcaaatactgtttcttgtgcgtgtaatgtctttcccccttgtctattaccctttgtatcccagcatatgcagcaggggctggcatacagtaagtgttcaataaacgttgaatgaatacattttaaaagtcaaaacatgccacaaaacctccaaggatgcacactaaatccaccattgttctgattgaaattttagatagaaatgcatgcatgttactacttttatgatggaaaataatgatttatacgcaactacacacacgtaataaaagctacaaaagaaaatgcattcacttcaaaatagatttaggttttaataaaaataaaatacgtccattcacatactaaattagcaacttaaaaattataatatctaatgctagcagaggtgctatagagtagctttgtgatgtcactagagaaaatcagaataaaatttgggagatgaattctggtatatgtattaagagccataaaaaaacacagctttcctttgatctggtaatttcctttctggcagcttaattcattttttaaaattcaaaatatagaaaaatagtcacaagaacattgaataagagactatttgttttgaaaaagtggaaacaagttaaattcccatcaccaagaacatggttcaatcagttttgatgcatttatttgggtggccatttaaactaatagctatgaagactgtcttgaaatatacagaaaaaccaatgttaagggacaaagacaaggacgcataattgtatgcatccaatgactacaacaatataaaaatgtaaatgtaacaataattacaaggaattatgggtcatttccctcctctcattctatataatctcattatattatttttagaatttaaataacatttttagaagataaaaataaatgacatatagaatacaatataaaaatgatagaattatagaaacaactttgatactggctttcaatctaattttttacctgagattgacccctggtagtaattgctattacattacagaatccaggaatcatggtgctccatcatctggtctgtgccatctctttaatcaatatttatgaacttactttgcaaaggttttatgactcattgtaccttatagaagttttttttaagaaagtaattttgtcaacattattgatactcatgcacgagccttttgcatagggcgttagctatttatattgagaacaatttctcatgatggcggtgaagctctattttaggatggatttacatattttatttaaagaactgcagcctggagatgaatttcatctgagttccagacacataccccccaaaaaatcactggagcaagactcaggatgagctcccagtgacttcagctcttcctgcaagttggaagacctccaaaatctctagctcttaggacgttcacatggtccaatcacatttccaaatatatttctactggcatgatttactttcttctaaaacttgatgtgcctaaaatggccccaactgactcttctgacttttgtttctaacatcagtacccactttccgagtcacttaaactctaaaagtcagaaaactaatgataatctctctcttcttctcccacacatataaccagtcagcaaggcctggctttcttgatgattattcttgggtcaaaacctttctctttgttttccctgcctttacacttattcaggtttgccattaattcaaaagtgtcataattagtctctctgtcactatctcttcctcgctgtctaatcctgttgctatataaatatgtctagggtgctgatttggtcatgcaactccctaggacactaagaaactttacatacactcctcattaccagctggatgaaataagctgcagtgttcaaagccctttgtaatttagtgccaacctaattttcttgcctcattctttcaaggctgccacattatacaatgccaagggcactattcacattataaaatacatcttcagaataggtctccagtaggctgcaaccacagaacacagtgtgaatagtgttccctggagtcatgcaacatggagctcataatcctattctctagtttttacctagcaaatcttgcccacttgttaatacccagcacaaactcctcctctaggaaactttttctgatttctccaacctttttcctctttcctagtataattttaattatgtctgttatgttcatgtattgagatatgtcagaatcagctggaagtcttatttatttacttacttatacattcagaataaaacaatttgtgtgtaactgaataacatgcaatagtaatctatggtgatagaattaagaatacctcttgctttaggtaggggcattgagtggaaagaggcaaaaggaaacctttttttccagtgttattgagatacagtggacaaaaattctatatatttaagatatacaacatgatatcttggtaaatgtatacatggtgaaataattatcacaatgaagctaattaacatatctattaacacaagtagttacaattttttttggttgtaatggtgagaacaccaagtccttagcaaattccaagtgtacaatgcagtattattaactatattcaccatgccgtacattagatttccaggattaatttattcggcataactgaaactttgtaccctttgaccaacatctcctcattgtccctacccctagccactgacaaccattgttctttctactctgctttgatgagttcagctttttaaaatcccacatataaatgagagcagcagtgtttgcctttctgtgtctagcttatttcaaataataggatttccttctttttcaaggctgaataatatttcattgtgtcttggctattctgaataatgctgcaatgaacatggtcatgcagatatctctttgattatgtggttccattttcttcggatatatacccagaagtagaattgctagatcatgtggtagttttatttttaattttttgaggaacttttataccgtttttcacaatggttgtaccaatttacattcctatcagtagtatgcaaaagtttcctttcacctatatcctcaacaacacttatctctttttttttttataatggtcattctaataggtgtgaggtaatatctcattgtggttttaatttgcatttccctaattattagtcatgttgagcacctttacatatacttgttgggcatttgtgtgtcttctttttggaaatgtctaggtcctttgccatcttaaaaattgggttgttattttggtattgagattttgagtatctgtatattttggatattagacctttatcaaatatatggtttgcaaatattttccccagtttcacaggttgcctttttcttctgttgactgttttctgtgtaggtgcattttagtttgatgtagtactccatatgtctatttctatatttattgcctgggtctttggtgtcacatccaaaagattatttccagaccgatatcagaaagttttttttctatattttcttctactacttttatagtttcaggtcttttatttaaatctttaatccattttgaatttatttttgtatatggtgtgagataagggtctagttcattctggatatctagttttcccaacaccatttattgaagagactatgctttctgaattgcatgttttggtgccctgtcaaatatcagttgactagatatgcgtggatttatttctgggctccctattctgtttattggcctatatgtccgtttttatgccaagtaccatttgtctgttttaggcatggtactagttttaattactgtatctatgtaacatattttgaaatcagaagtgtgatgcctccagctttgtttttattcaagactgctttggctattcagtatcttttgtggtccatataaactataagattgctttttctatttttgtgaaatatacctttgtgattttgatagagattgcatggaatctctagatggctttggatagtataaacatttttaacaatagtaattctaacaacccattaacatggggtaacttttcgtttatttgtgtctcttcaattcttttcataagcattttatagttttcagtgtacattacatatatttcatgactttgatgaagttgttcctattttactctttttattgctattatagatagaattgcttttctaatttttttcagatagtatgcaacagatttttgtatgttgcttttgtatactataactttattgactttgtttattagttcttactggttttttgtagagtctttaaggttttctattacatatatgatcatgtcatctgcaaacagttcattttacttcatcctttctgattttggatgtttgtttttgtttgtttgttttgttttgtttttgtttgtttatttttcttttttttttttgagacagagtttcactcttgttgcccaggctggagtgcaatggtgtgatctcggcttactgcaacctttgcctcccgggtccaagcaattctcctgcctcagctttccaagtagctggaattacagggatgcaccaccacaccctgctaattttgtatttttagtagatatggggtttcttcatgttggtcaggctggtctcaaactcctgacctcaggtgatccacccgcctcgccctaacaaagtggtgggattacaggcgtgagccactgcgcccggcctagatgtctgtttttaatttttcttgtttaattactctggctaggactttcagtactatgttgaacagaagtagtgagagtgggcatccttgcattgtatgtggtcttagagggaaagttttccatattaattataacgttggctatggacttttcatatatgggctttactgtgttgaggtacatttttataccttttttgttttattttattttattttatttgaaattccgggttacatgtgcatgatgtgcaggcttacataggtaaacgtgtgccatggtggtttgctcacccatggtggtttgctcacctatcaatccatcacctaggtattaagcccagcatgcattagttatttttcctgatgctctccctcccctcagcccccatgacaggacccactgtgtgttgttcccttctctgtctctatgtgttcagattgttcggcttccatttataagtgaaaacatgcagtgtttggttttctgttcctgtgttagtttgctgagaataatggcttccagctccatccatgtccctgcaagggacatgatctcattcttttttatggctacatagtattccatggtgtacatgtaccacattttctttatctagtctattactgatcggcatttgggttgattccatgtctttgctattatgaatagtgctgcaatgaacatatgcatgcatgtatctttataatagaatgatttatattcctttgggtatatacccagtaatggcattgctgagtcaaattgtatttctggtgctatgtctttgaggaattactacactgtcttccacagtggttgaactaatttacaaccccacccacagtgtaaaagtgttcctatttatctgcagccttaccagcatctgttgtttcttgactttttaataatcatcactctggtgtaagatggtatctcattgtggtttttatttgcatttctctaatgatcagtaatgttgagcttttcttcatatatttgttggctgcataaatgtcttcttttgagaagtgtttgttcatgtcctttgcccactttttaatggtgttgtttctttcttgtaaatttgtttaagttccttgtagattctggatattagacctttgtcagatgaatagactgcaaaagttttctcccattctgtaggttgtctgttcactctgacaatagtttcttttgctgtgcagaagctctttggtttaattagatcccatttgtcaatttttgcttgtgttgcaattgcttttgatgttttcatcatgaaatctttgctcatgcctgtgtcctgaatgatattgcctagattttcttctagaatttttatagttttgagtttaatccgtcttgagttaagttttgtttaaggtgtaaggaagtggtccagttttatttttttttattttttattattattatttttttaagatggagtttcgttcttgttgcccaggctggagtgcaatggcgcgatcttggctcactgcaacctccacctcctgggttcaagcaattctcctgcctcagcctcccgagtagctggaattacagacatacatctccacgcccagctaattttgtatttttagtagagatggggttcctccatgttggtcagcctggtctcgaactcccaacctcaaatgatccacccatcttggcctcccaaagtgtggggattagtggtccagttttaatcttctgcatatggctagccagttcttccagcaccatttatgaaatagggaatcctttctccattgcttgtttttgtcaggtttgttgaagatcagttggttgtagatgtgtggtcttatttctgagtactctatgttgagagtatttatcatgaatcaatctcagactttgtcgaatgctttttctgcatctattgagacaatcatgtgggattttttctttcattttgttaatacagtgtatcatattagttgattttgcatgtttatcctccttgcatcccagagatgaatcccacttaaatcttttaacgtgttgttgaatttcgtttgctctattttattgaggatttttgcttctatgttctcagggatatttgcctgtagttttcttttttgtgtctggctttagtaccaggttgatgctagcctcgtaaaatgagtttagcagtgttcctcctttaatgttttgtaagagtttaacaaatattgggcatttatcccttttcaaatacttagaatgtaccataaaggcatctggtcttggagttttctttgttaagggttcgattactgattcagtctcatttgtgactggtctgttcaggctttctatttcttcttgatttaattctggtaggttgtatatttctagcaatttatcattttttctgtattatccaacttgttggcagataattattcataatagttctttatgtgcctttttatttctgaggcattcattgtcacatctcctctttcattcctgattttatttatttgagtctcatctcttttattctaggttagtgtcttattccatttgtgatgctataaagaaatacctgaggctgggtaatttatgaagaaaagaggtttacttgactcctagttctgcaggctgtccaaaaagcatggcatctccatttgcttcctgtgagggcttcaagctgcttccactcatggtagaaggtgaaggggagcctgcatgggctgggctgatcacatgacaagagaggaagtgagagagtggaggaaagtgccagattctttttaataactagctctctgggtaactgtctctggaactaatagaatgagagctcattacttcaaggatgtcaccaagcaatcaataaagctgagggatctgcccccatgaaccaaacatctcccattaggccttatctccaacactggggattaaatttcaatatgagatttgggggcctcaaatatccaagccatagcagttagtctaactaaggtttgtatatttttttttaaagcaaacactttttctgttgtttttctattctttaatttacttctgcttttttcctgctaactttgggcttagtttattcttttcttttagttccctgaggtttgaacttagattgcttattcgattctttccattttttttaatatagctatttattgctacaatttttttaatattgcttttgttgcatcctgtaagttttggtatgttgagtatttgtgttcgtttgtcttgaaatagttttaaagttatcttttgatttcctctttgacccaatagttgtttaagagtgtgttttttagcttccatatatttgtaaaatttccagttttctaactgttattgatttctagttttattccattatggtcagaaaaaaatactagaaatgatttttatcttcttgaatttcttaagacttcttttgtgacccaaagtgtgatctattctgggggatgttttgtgtatgcttgagaagaatgtgtatttgtctgctcttgagtagaaagttccacatttatctgtgaggttcactttgtttattgttcagttctgctgtttctttattggttttctgtcagaatgatctattatagaaagtggggtattgaagtttcctactatggtactgctgtctgtttctctctttatttctgttcatgtttgctttatttagtctgctttgatgttgggggcacgtacttttaaattgttatattttcctgttaaattgaccctttatctttatataatgaccttctttatctcttgtgacagttttcgatgtgaattctatttcatctgatataagtatagccactttttctctctttttgttgccatttgcatgaaatatcttttctgtctctcactttcagcctatgtgtgtcctttaagctaaagtgagattcttataggcaacatattgttggatcttgttttttataaaaaatacattcagccactctgtcttttattggagaatttaatccattcacatttaacataactgttgatagataaggacttactcttgtcattttgctcattgccagaaaaccatgagcaaagtctgtagtttctttgttcctttcttcctttcttgtgtctttctttgtgatttggtgatttttttttttttttgtagtggtatattttgattcctttctctttatcttttgtgaatctactagagatttttcccttgttcttaccatgaggcttatatttaaatttcataagtcaattttaagctgataaacactttaatcacatataaaaactatgcttttacttcttccccttgtcacattttgttatttgtgtcacaatttacatctttttatattgttattcattgataagttattgtatctatagtttttaatagttttgtcttttaacttttatactagagtttaaaatgatttacacactgccattacagtattagagtattctgaattttactatatgcttatccttaccaattgagttttatgtttttatgggtttttatgttactaattagcatccttttgtttgaattttaagaactagcttgagcatttttttgtaaggcagtttgagttgtgataaacttcctcagctgttgtttgcctgagaaagtcttcctttctccttaatttcctaagaatacctttgctgggtatagtattttgggttgatggggcttgggagtggtttctgcactttgaatatgttatcctactgtttcatggcctgcaaagttttcctgagaaatttactggtagccttatggaggatcccttgaatgtgataagttgcctttttcttgctgctttcaaaattctttatttttttgattttttgataatttaattataatgtgtcttggtgttatcttctttggattaatcctgctggggaacctctgagcttcagtcatctagacatccatatacttcccaaagtttggaaagttttccagtcattatttatttaaaaaacgtttctttttctttctctatctcttctcattctgaaactccatgtgtatgttggtttgcttggtggtgtcctataaatcttcttcactcttccttattctttttctcttccctgactggataatttcacatgacctatctttgcattcataaattcttgttgagcttttagtttagatttcctgatttcattgagttgtcggtgtcccttacagcttgctgagagtttccttaaagcaattattttgaattttttgtcaggcattcaatagatctccatttctttggggtcattactggagctttattagtttctttggtggtgtcgtgtttgtctgattctttatgatctgtgtggctttgcattagtgtctgtgcacctgaaggagcaaccatctcctgactttacagactgtttttggtagatatatattctcctgctaggttcacagactgataagactgcttctgggattgcagtcaagcttggctgaagctgaatcatgtggctgctgctggctcctcagtagagtccatagttgccaggcctgttgcaaggggacaagcagccatggctcctgtctgatacccaggggaatgggactgttttctggacaatagttgagcagggctgaagccaggacatggggctgcttttggtcctgcattcaagtctgcaaatggcaggcttgttaccaggagcatggataagtgtggctgccagcagccctaagtgggctcctgctggttccctggacaagcagcactacatctgcaccatgacaaaatgggtctggaaccagctcacaggactgctttagagtccacagttgggtatgagattggtgggtccgttaccaggggtgctgacaggcatggctattattgtgtccctgggcaagcagaactgtcttcagattgtagtagagcatggctaggctatgtcacagggctgctgtaggatctgcagtttggtccaatttgggaagcatgttacttgggtcatagctgggtgtgtttcctgctaggtctttgggcaggcaaggttgcccctggacaacagcagagcaaggctgggattgaaccaagtcacaaggctgcttcaggatccaatctaggacttagggcaggatacttgctgtgcctctgggtcaggactgactgactacagtagatcggggctggagttggatcacagggctacttcaggatccacattcaggacagaggttgtcaggcctgttactgggagtatggaaaggtatgtgtctctctggttccatgagtgggcaggactgactttgtggctgcagtagagtgaggctggagctgagtcatggggccacttcaggatccacagttaagtccaagtctggtgggactataactgggagcatagacaagtgttgctccttccgggtccattggcagatggggctgatttcaggacaaactgcagccaaatggagctaaatctaagtccataggaggatggagtggttttcagtcagcacctggacccacatttggcaagcctgccaccagggtgtaggcctgccttctcaaagtggctccccccagtcttgggcttcatcagggctttacatccttttacctgggtcccaagtctcccacaatggcacttttttccatggatgactgccaggtcactgtttgtgtgggaggatatgagctggggacctcctattgcaccatcttgctgacatcacatacacgctgagaaaccttgaacaaattctctttacctttttgagccttggtttcctttgcaattaaatgatcaaatgacataatggatgagaagatgtcttgtagagtaggcaggctgcatgaatgcaaggtagcaacctcagcataagcacctggatgacaggggtttcattcatttcttatccttctcaggtccaattgtcatgtggataagtagtgctcaatgtgatatcatacaacctgctgaaatgggtaaaacttcatatattaatccaaagagttatggaacatagttgttacgtgcttttagaatttgaaaaggttttagagattgtttccatcaatgccccacctcaccttcaactaaagttgtaccagaatatgaaccatttttactcacaatacttctgacatcaaatatgtgtgtggatagggggttctatgccaacaatcagttttccaattttctggacaccgactgggtgtcctgcaagccaattaaattctgacattaactactcagaattagtgtcagaccccacaggtttaagcagtgtcagactccataggtttaagcatttagtcccaaaagactgctctcacctcagacaccagcctcaagccccaggttagtgcctatatttctgactaactgactgtaaattgggggttctcatgactccactcctcagattcagtgatttgctaggatggctcacaaaacaggaaagtgctttacttactattactagtttatatgaaggatattgtaaagaataaaaatgaacagccagatgaagaggtacatagggtgaggtctggaagtgtcccaagaacaggagcttgtgtttctctggagttaggatgaatcaccctcctggcatatggatgcatttacccacccagaagctctctgaaccccatcatttaggggttttaatggagatttcattatgtaggcatgattgattaaatcattgctcattagatattaacttaatctccagttccttttgtcttcctggaggtggggggaaggagagctgaaagttctaatcttttaattatgctttggtttttctggtggacagcccccatcctgaagttatctaggcctcccagacaccagtcatctcattagcatataagatactcatcacttcagagattccaaggatcttaggacttgtatgtcaggaacctggacaaagaccaaatatatattttttattatgccacacagggtcaaagagatgcagttgctgaggtcacatctgcatggaggttttcagtttttctttcaattattctttgctgattcctcatattaagatcccataaatgaaagacaagtacaaatataaatattattaattttgaaattaaccaaaaacttagtaacctggttaaggaaattgatgaaaagtttacctaaagacagtggaagagctagaaataatgaatgctgggatttagcactattgctattttcttttcttctgcaaagaacagcaagcactattgagcttgcgttctgttgagaagagcagggtattagcaatgactgatgtagggaaagcaagtgggatcagacatctggaactggggtagagacaaggaagaggcagggccaggcatccatgccagaagggtttgttgtaattctttaatgccattcctactgtcattatcataccttctttatctctactctttactcatctctgttggttactcataggtaccaccactgcaacaccccttagatacctgaaagttctttgaggtgaaggattctatcatgtacatctttggatcctcctgatcacccagtaattcactattgaggcttgataatgatggatgaatgggtggatgatggatggatggatggaaaaattgatgatggatggataataaaaacagaataaatactgacagaaacccagaggtagcaaggaaaatcataacaacttactctccctgtcagcagggtccaagcatattttggagtgacttttcggagatatgttgggtttattttattttaatatcctttaatcctgagattaccaactgattgcccatggaccaaattcaacctaagcatctgtttcatttgcccttgttattaagtctgtctactgttaaatacacagggaaagaaataaacttatatcatattgaatgcattgccaacatataaaaattgagagatgtattattttaaaagaattgatatttttctggaaactcagcaatagtggcctcattattctactccctgtaaatagggcaggcactgtcctatgtgccacaataatgatcactggcataggtaacagtcagttgccatctattactcatgttcaaaattttaaaaattctaacccatgcttcttgattaaattgccttcttggcccattaggcttcagggtttacaaaactggctttagccagtaacacagcaccttctccacactaaaggaaagaacaagatcaaaggagagaaattttaagaaagtaatagtaacaacaacgcttaacgggctttcaccattcattgtgaactgtgctattttacatatactcacactatactctgtgaatcagctatattcttgtcacagtttcatagctgaggaaactgtgacttagatattgggtaacttgcccaagactgtagttcataagtattcataatccagatatttctgcctccaagtctgtcattggaaccactacactgcctttgtactctttcttaacatataaatgatgaaatcagcactataatatgctttcttcatctcttagaaaaagcaaataaatattgattaactacactcaagcaattttaaattagtcagtcagttttgaagtgctccaaatcttgcctttttttgttcatgtggtggggctggcattaataacatgcctcggtaaattccctcagcatttggtagcttgaaacatccaacatacaggtgggaggatgtgtatagcaaagaaataacataaaatttctttcttttcttttcaattgaacttattgtgacatgtaggaaattcattctgaaagatggtgggtttcttaaatggtagctaattctgatgcatctgcaaacacttgactcgttgggaacccgagctccttctgcaatcgtgtgtgcaaaaggggacattatcactgaattagaggaattagaggcatccaagtctcactatctcagacactctggccctcttgcagcatggaaggtttctttgcattcctttttcagttaatagctcctgtgttttaatcaaatacatctccctggtttaatttttttctagtaacgtttcatttttttttcttctgagctgtgccttctatgtttttttttctcgagaaattctcatctaaaccaaatttctacacctaccccatcattattatgcattatctattataataacagacctttttgactgttctacactatgctgaaggcacccaaggcctttgtctaattgtctgtatcaactagacatggaggaaaccaaaacttgtgtgctgcaccttcaatggggtagaaagttgcttcatccaagggataactcaggtgaccataaggattgctgctttgttctatatgtgaatgcctttaagaacacagttatgataaaataacattgattccatctatttattgcacattttattatcataaaacttctagagggtcatatcctaagcagcagcttggacaaagagggggaaatgatcagttaagtgtatttggggaaagactttacattgttcttcttctagtgggaagaatatcttctatggttaacgtaaatatttggatccaatcagaaattgtatttttaagaacatcttgggaatacattccatggccggatttcagaatgcatattaatgtccagttcactggtttatgcccttttcatttgacagctatcacaagaagctccttcgtgagccttgcctcaggcaacattctagtaatgtgattcgagggatgctgaaatcctcccgacaaaaccccacccaaaaatatagatcccacatatctaccccctaggctggaattcccacgattagtcactgctcgggaaacagagatgcctatccctgggagaggaggctcatttagaactattaaatatgcctctgtaaaatcaatacattcaagttttctctgaacttgccataaattttctcacctctgtacctggtcagggacatttggaatgctcttacatctctttgctatttgtccagttgcttctcaaaatcagagatctggctcaaatgttgtatttctcataaaaaataatcacttataaccccagccaaaaatattgcctacccattgaaacatcagtggagcacatttatacttcactaattcaacattaaatggaaaccaggaagttagaaaatgttgaaaatagagaaataaacacgggtgtctgcccctgggtcctcatgtcctccaagacagcttttcccaaagtgataaatgtcccaaaacagtatatgcaatgattttagatgatgcatggattgtttttgtatttcattattatttaattactcttacctttactaattatggtaaaagaccttgattttccaatcatagaaatgatatgaagatctttaaaagaataaatttatttaaataagaaaaaaacaagtagagataatgaaataaatctttaaataataatacaagtcatttaaagatatggcaaaaacagaaaagacacctaccacccaaaaaacaaacaaacaaaaaaaacatgaagtaggaacttagcatgcatagatttgaggaaaaatgttaataaagtattttttaaaaccctgaaatttagaaagttgcttcaggaaaaaaaagacttggaaatagataaatggccatgtaacttggcagggactatgacagagttatgaagagacatctgtcagaggccaacagacacatcagctatttgtgctgaaggatcagagatgaactggcttgtgcactgctcaactgatctaccacattttaggcatgtacctcgtcttctcagaaaccacatcatgtggccctaagagggaaggattccctctgcttcatcagccctccacacggtaatgcatgtgtgaactacttcttgttcccaaagctaagatctgaggaaaaggtattgtttttataccttatacctgctataccttatattccttgcttatacctgctataccttatatagcagataaaatagaaatgtatatgtatttcagccttgccatcttacaccttcctagatttacaattttagttctcttaattaataaccataactctttccattttttataaagtgttctgaaaaatgatctaaaactcttgggaaataccttaccaaaaaagatcctgcttcagaataaccaagatctggctaaacaggactctgtggggagatgggtgtggctagcagtaaatcctgggaacttcggatttataggcctacaagagatctccataaacagccaggatagagcaggagtaacttcacggccggaggcaggacacacaccctccactctttcctctcccacttctgcttctcagtgtgccctctctggagtctttatggaaggcacatcacctgggaactagcatagcatatgagaaaatcctgggtttaaattctggctttgccacttgtgagctatttagccttgagagtgttactttacctctccaagtttcttcatcagtaaaatgaggcttatagcatcttacccttacaaggcttttttttttttttttttttgacagagtgtcgccctgtcactcaggctggagtgcagtggcatgatctcggctcactgcaacctctgtctcccgtgttcaagcgattcttctgcctcagcctgccacgtagctgggattacaggcgtgcaccaccaagcctggctaattttttgttttttcctgtatttttagtagagacggggtttcaccatgttggccaggctggtctcaaactcctgacctcaagtgatcgcaaaagtgctgagattacaggcatgagccaccacgcctggcccaaggcttgttatgaggacttgagataaagaatgtaaagggcctgtaatatacagtaagaatcattttataatgattgttgcaaaaggagaagtttccttgaatgcaatgttaggacaataagggctgcaatcctcctaatatccagggttcaaaatgagcctggaggggagagggtaggagaggtaagtaaggtagtgaaggagctctcagattcttgcacatcagctgggaccttgttagaaatgcacaaactcagttcttaccccagacctactgaatcagagtctgcatgttaacataatacccaggtgatatgcgtgcacattggaagggaagaagcatcgttgttagatattcctcttcctctgctcttctaactccatcctttcttccccttgtcaggcaaatatgaccacaaacctcttctcccgaaatagctcaaaaataatcacaaaaagagtaatggtgaacaacatgtgccacatactgttctacacacttggcacacttgacatccatagatttatttaatccccccaacaacacaatgaaatgaatactatcatcccctttctacaattgaggataccaagacacaggaaggataaagtcacttactaggggttatacagccagcagatacaggttcctggaccagggaccaggcattttggaactagagtcctttctcttgaccatcacagactccagctttcccttttacctctccaaatcatgggggaacaaaaaaatgtgtttcaagcaatgatgcacctgcctctagaaatataggctcacaagcattaatctgcccgcacatcccctgtcagagtttggagctggatatcttctccctaaacttaggcagttgcttcctcagcagacttgcagcctctggtctttctcccagtccaggctgttcaaacactgtagccagaattttgtcttttttaagagcagctctggtcacctgttcctatgtcaaaacttcaagagctttcttatttgaataaaagttactgcttctacttgacattccggtttcctgcttgaggcacgtcttttctcaagcccgtctttccaaaactatctccaaacatctctctttccctcccagtacgtgcacattcgtggagcaacacagccgtgtgctcacttctcagctgccacatctttgtctctttctagaatgcatttcccatattctgtctgcctgagccacattcaggccccacacagatactctattctcaagagacttttctacatgtacaaagtcaagattcatctttctctctcttcttttcctgttgaactctgactcactcgtaggacttaccacaccctgtcttctattaatattgggcatgtgccctgtgctaggctagttaaatgttcttgaataaaaatattgactgtagataatgaacactaatctactttcaagttcaacttcctgaagcacatttattcagctttctctatggagtatctgggcatttaagcaattacattatagtatgttgcaggggtggtagaaactcccctttaccctgcagcagactgctctgagaaatctgacttattcattgatttttaacagatgtgaaaaacaatcttacatctatagcaatgagtagctttctggctatagtactttattcatctattttccctttacacctaagttcattttatatacagatgtttttaaaaacacattttaggccgggtgtggtggctcacacctgtaatcccagcactttgggtggcggaggagggtggatcacctgagttcagaagttcgagaccagcctagccaatatgatgaaaccttgtgtctactaaaaatacaaaaattagccaggtgtggtggcatgcacctgtaatcccagctatttgggaggctgaggcaggagaatagcttcaacctgggaggtggagtttgcagtgagccaagatcatgccactgcactccagcctgggtgacagtgtgacactctgtctcaaaagaaaaatgaaaaatccccacatttaaaaagtaggctgacccctaactattgtccaaaatagctcattttctaaaaagctgtacactctttatgcaagtttacttctagaaatcccaagaaattatcattaatatattcaaagattaagctacaaggatgttcattataaggtgacttatgttagcaaaaattaaaaaataacctaaatattcaaaatagtagtggttaactacatcatgattatgtccaacccgtgacatgctttgcactagctaaaattatattgaaattgttggtggaaacaagtttacggtattttttaattgagcaaaaatcatatgaaagaatagaaaaaccataaataggcccacataaatatgtccaacggatttttttttacaaaggcgcaaaagcaatttaatgaaagaatagtcttttcaacatatgatgctgcagcaattgggcatccataggcaaagaataaaataaatagttaaaattatttaataataaagttaaaattattgtgtaaaattattttatataataattacttcataatggatcatagatttaaatgtaagacataaaactagaaaacatgtagaagaaaatcttttgggcctagtgacagagtcaagagtctttatatatgactgaagatttcttatatatgaaattgtatggagaagagaagaaaaactgacattttgggctgtgtcaaaattaaaacttcatgctctacaaaagtctctgagaggagaataaaaagacaaactacaggctgggaaaaagtgccaaccacatatctgacaaaggaattgaatctagagtaaagaattctcaaaactcagcaagacataaaaaattataaaaacaaaaatctaattagaaaatgggcaaaacacatgaatagacgttttattaaagaggagatggagatggtaaataaatacacaaaaagatgttcaacattattggccattaggaaatacaaagccataatgagatgttactgtaaacctatcagtatagctaaaataaaaactgataatagtagcaatgttggcaaggacagggagacactgaaccactcatacattgctgttggaagttaaaaaatggtacagtcactctggaaaacagcttggcagtttcttaataatgaaaacttttgatatgcacttaccatacaatctagcaattgcattcctaggcatttatcccagagaaataacaacttatatcctggagcaagaccctgtttcaaaaaacagacaaacaaacttgtgtccacccaaaaacctgtacgtggttgttcataacaattttgtttgtaatagttaaaaactggaaacaatccaaatatcctttggcaatgaatggttaaacaaactgtgatctgtctgtaccatgaaatactcttcagcaattaaaggaatgaactactgatacagcaatttagatggatctcaagggaattatagtgagtgaaaaagccagtctaaaaaggttacacatgcatgattccacctatataacattcacacaatgacagcattacagagatggaaagcagatgaatgattgccgggatttaaagatgcggcagaagaaggaagggaaatgagtgtgactataaagagataacaccaagggcttggtggtgatataatagctgggtattttcatcattgtagtggttacatatatatatatatatatatatatatatatataaatgtatatttatatatattgttatttatatatatgcatatataaataacaatatatatgtatatacgcgcatatatacatacatatgtgtatatacatatatatgtatgtatatatgtgtatatacatatatatgtatgtatatatgtgtatatacatatatatgtatgtatatatgtgtatatacatacatatgtatgtatatatgtgtgtatatacatatataagtatgtatatatgtgtgtatatacatatataagtatgtatatatgtgtgtatatacatatatatgtatgtatatatatgtgtatatgtatatatacacatataaatatatacatatatataaaaatatatatttatatatacatatatcttatgtatacatatatgtagtggttacatatatatatataaaattgtatttctctaatgacaagtgatgatgagctttttttttcatatgtttgttggctgaataaatgttttcgtttgagaagtgtctgttcatatccttcacccgctttttgatggggtattgcagcactattcacaaaagcaaaaacttggaaccaacccaaatgcccatcaatgatatactggttaaagaaaatgtggcacatacacaccattgaatactatacagccataaaaaaggaggagttcatgtcctttgcagggacatggatgaagctggaaaccaccattctcagcaaactcacacaggaacagaaaaccaaacactgcatgttctcactcataagtgggagttgaacaatgagaacacatggacacagggaggggaacatcacacactggggcctgttgggagtggggggctaggggagggatagcattagaagaaatacctaatgtagataacaggttgatgggtgcagcaaaccaccatgacacatgtatacctatgttacaaacctgcacgttctgcacatgtatcccagaacttaaactataataaaaaaaattgcatgaaactacacagagacaaacacatacacagaggtaaacgctgtgaattctgaacaaagcctgtaatgtagttaaaggtactgtgcaaatgtcagttttctgcttttgatactgtactacatttacataaaatgtagccagcctggcggtggctcatgcctgtaatcccagcactttgggaggctgaggcagctggctcaattgaggtcaggagttcaagaccagtctggccaacgtggcgaaaccctgtctctactaaaaatacaaaaattagctgggcctggtggtgcgtgcctgtaatcccagttacttgggaggcagaggcacaagaatagcttgaacccaggaggtggaggttacggtgagctgagatcagtgccactgcactccagcatgggggacagagcaagactctgtctcgaaataaaaataaaataaaataaaatgtagccaattggggaagcagggtgaaggatatattggactctttgtactatttttgcaatttctttttattttttattatttttaatccactcatctgcacacagatatatttgcaattccttatagtttatgattattttaaagttttagaagtctataaaacaatatgtgtacttcaactatgtataaataattttaatttgatgtctctcagttgctcatatagcagtatttgttacacagtaggcactttattaaagaggctctcctttttccccttaaccttatggatattatgaatcttgtacctgaccatgcttcctccttagcttgtggcacgaagcagcacccctgttgactctggtatactaggttatgctttcctgtgcgtgcagctcacccttggccttattactgttcaatctttattcttcctgtgccttacctttcttaacccttaaatgtaccattaatatatttgaccattaatacatttaaggattaagctacaaggatgttcattataaggtgacttatgttagcaaaaattcaaaaacaacctaaatattcaaaatggtagtgattaactaccatagatgctgtacctctcacattacatatatgcttggaagccacgttaaatatcttgtagaaggtgttgggatggagggtaccgagcaagtgttgatggattcccgtattctccaccatgactaggcaccaaaagaggacccttccctgtttctgcagcagatagatttttcagagtttaagagagcccactctgcttcaagcgggcccacagagttccatttaaagtagatctaataaagaaatggcaggcagaatcacttaatacgttcagcacttgattcttcaagtgactattagctgctctgtgtaaagcctacagcaaattcttaatcttcaaccagctttcacctatcatccagctgttttttgcttagggaattaaagctgatgtttataagtaactaagcaaaatacaattaggaaggagctctattttaaaggaggtatgtgatacattccaaaaataagtaggtatcccagattgtaacttgatttttaaaaaatcaattttagcaaattagtcataatatattgttacagttattgatcattttttcttccattgaaaagtactgtcattgataaagagacgaagctcatatttcctaaacattaatagtgaaaaaaaacatatgcaaataagtatgaagatattttctatggctcttgaattggaccaagatatgtgtgttctggtatatatgcttaaaatccttccacctggtcaaaatgctttcaaaagggaaagaatagctgatgcctcttgttcagactggaaagtattgtgattacactgaaaagcatggcccctcttgaagtttagttttttacttcttttatttgagtataaagcaaaaaggaggtttctctaagatgtcctaatagaagcttttgaatgatctgcagaggtagcattgaggtgaatggagtccatcaagatttgccagaagtatgaaataattatcgaaaggattccattagagacgaaagctacctagactaatagagacagaaaaggctgacccttttcaggctcttaactctctctaatggatggccttaagttgaaatcaagactcaactggatcattgattcttaaggaaaaaatattgagcatagtggcgtataagcaaaaattgtaaaagtggtcagacagatttatcttttagttatagtttgtaatgaaaagtatgttttttacctttttctgcgctcacaggaatggaggctaaacaatgtgacatattatcataaagtaaaaattagttttaataaaaaaacaaaagtcttactttaataaatacaacatgtttccactcaacaaaaagaaatctacagattttttggataagtgtcattatgtgttacctattagataacacagagtgttttttggctggtaattgacccataggtcaaatcctgcactttcctctgaagggatcatggaagtgctactccttcacaagttttggagctatattttgcagtgcatgcttcagtaacccacatgcaaagcacacactcacatacagaccaggcatatccatgcacaggcacacacacctggctagggtaaacaggatcaaatccctgaaattatctaaaatttcctgtgtttgttgaaaacagtgactgatgcctttgcgttggttgttccaaagcacttcattgcggctcggtagaagtgttctgagtgtcaaattggtaattaagtggtttgttatagaggaaaaattgctaataataaataaaaatactgtcattgtctgagtgtagggtcagctgaagtcatggatcaaggagagaagcgaaattgcagatggggcattttggttgtcatttacgttaacattaggttgttcctgatgagcaaaagtggccagtaatatgaaggtagacgcaaagaacttatttttagacctcaaacacagcactaggttgaatgttttaaaaatctgtatcatttaaatgggcatatcagtacactaaatgtacttgttaaaaactagatcattaataaataagatcagtattcaaatagatattctgagagaacataggaaaacctatagtacagttaatgaatttcctttcttcagaattatatatcataggtgtaattttgcacttgagggtagtaaataatcttataataatgactcagcagatattggaaatttctataaaaattttcttatttatctcattgaaagctacgaagtattttaattcattcttaaaggtattattttaatcagtagataaatatcggttaaatatatatacatacaacacttatgtatatgagccgggcgaagccaaatatagttggacttttactaataaaataaaatactttatgaaatataaaacaatctcttttaaatatggtatgacctaaatgctactcttagttcttcaccttcagaataatttttttgcctcaccatgtttttgtattatgtttgtatgggtgcagctttaaaacaaacttttatatacatttttttcaattctttctaaaatattctatgaattaaatgagacaaatatcattacctccattttacagaggagaacactgaggcttagaagactcaagtaagtgatttacccacagtcacacaacaaccaagtggtggagtctgggatgaaatctgtcttctgatgactttaaatagtgtggaaggtggctgtgtgtttaggtattgatagagcagatggtgagggtgattgctcttcatatttgaagatactcatgctgatggcctttgtgagagagtgatttgattagtaacagagagatggaaggaggcaggaaaggaggaagagagggaaggaagaagagataaaatgaaaaaaaaataaataaattgatgggtccagttcctgcagtgcatgggaaaacgatggctggtgaatgtcttcctgtttgcttataagatattttcctgttgagactcatttgtatgcttttcagaccacatgacacctttgttccaaaaagacactatatcacaaacagttaagaatgtcatccaacccagtgtcagctaatggagaccaagctatttgcaagggaacatcatcacaagcatggcactggagaacatgacattagttgaaactaactaggatgaagaataccagcacctggtagttagcagatttagaataaagctgttgaaataatatatatattggtattggaaaatgaggtttattattgaatttttttgttcagaaatctcctacatttatatatactatgttatatatagaaaatgtatgcatgaatctttaagtatggaaaatgcagttatttcctgattctatataatttttataatagtcacagaattaacgtgttccaagaaactatagtaatttataattacctctccagcatgtcttgagaggtaaataaattaatgcatgtgaagcttcctctacaaatttgaactttgccatgaatgagtgacccaacctaagtgcccagcagcgtatctccatcaacagagttcagatacagagggattactgaagactttattatataaatgaaaaaactattgaaatgcctacttagtcccctatattataatgacaatttgtttgatagggttttcctccccctttgaatatgtttatagctataatttgcttgcaaggtgaactctaatggactcagagtatttaaatattatataattcaattgttgacaaaattgataaggtacaaggttcataatatccataaggttaagggaaaaaatgaaagcctctttaataaagtgcctactgtgtaacaaatattgctctctaagcaggtattgttattttggttttgcagacattactgattaatgacttcgaagggagagtactggagtatgaatgttctagaaatgctgaaatgtttttactatatatcaaactataaattccactaattatgcatttatattccactctgggcaaaaaataaagattaatttttctaaatatgtttttcaggttcctagtagctatcatatgccgaatggatagctcaactgttcacaagtgagtgagcccaaaatgatgagaattgccagggcagcaggcctaccccataaaaagcctttttaactgaaaatgtttttagtttccccagacatagaaggaaaaaaaatagaaacggataatggtacagattctgatagtccaagtgtcatgtcaatcattaagtaacaatatttatttaacggactaaaccaagcttgccctatggattaactttagggtctaatgttattatagctagctagatagataaagataataaaaaggagagaaaacatttgatttttttatttccagggacaagtgttaaaaaacgtcagcatattactaggttcatttgccattaaatattgccaaatatatttagaatctatagaaaatgtctgattgagaaactattgaagaaaatctgcctactcaatcaactgctcctaggacatggttcaagggcaagcagaggaaggaaggaaaagtttctttcaaaaggttcaaatgaatagggcttgttagacctctgaattgggcttgtttcctttaaaatgaaaacctctgaattgggcttgtttcccttaaaatgaaaaaaagtctttttttttcaattttacataaagagaaagaaaaatataatattatctatgatttagcaggtttggagatctaaagaaagagctcatactcaagttaatagctttactggtaatacctttagctgaagaagttttaaatgtgatttacatggaacaaatcagttttaggtttcaacatacatttcaatctgaagcagtttgcagaattgaactaaatagactagcaaaacatttatttgagatcagcatgtgcatttgaaaatgattttccttttaaaggagaaaaatagcaccaacttttacttaaaattttattttcttgttattttatcttaggtctttgttttagttattgttttattctctttcaccttgaccaaataactaatttcatttagattctgtatgttagagatcaatctctgcctccctccaaaacccttcctttctgttaagggacttcttggttgaagttgtgtaaactcaacagtcagttaactggatgcacttttcactgctcaacctttgttttgcgttaattaaaaagcaactaacattcattctttcattttgtttgtcttttgaaagaatcagttaaataatatgtgcttaactggagattaagaggaaagggtcttataactattgttcaataaaatctcttctttttgtgtcactaaagatacaggttacataaacatcaacatgaaagtaatttgaagttttatttttacatattcatgtatagagagtggggctgtctttgtgctaagaaaatgaatgaaagacttctcatggtagatgaaaatcttaagtaagacctagaattttttattttttcaattatacatattagcattcagtacataaatgttggccaggctattctaaaaaaaaaaaatggatactttcctccttattttccaacaaggtgtccaattaaagattatgtactgcatctcaggaagagtcaaacacctgatgtccatttgggctggttcaaaatgaagccaaaaaaacagaaaaaaaaaaaaaaaagctccacacttgttttcaaactgttaagtctctaataattaaccattgtttgaaacatttaaacattttgtcacatatttaaattacagatgggccaatgagtcattttctttatagcacatcacccactgtttgtaaattagcgatgatccacataagcttggaacaaatagccatgtgtgtatgggatttagaggaggcaagttctcatcttttgttgtagagattattgcttctgtcttacttcattcacttgatttcacacttcaaactgactttttttcctttttgtgatttttctgcctgtctcataaatctgaaaagcaaatattaatgttttaaattaagctttaatatcatacgtggcataactttatatgaaaactaaaatgattatatattaaaaccactcttgaaaaaagatagccagaaaagcagaaacaaatttttaaagttacaacatttttaggatgaaaatgttctgagtcagtagaatagcaagagtaaatttgcttactgacatacagcattaaggaatattacggaattataaactttaaccttaaagatgactcatttcaacaccctcatttataggtaaaaaagccccaaacccctggagttaggtaccttacctaaaaattataatacaagtgactagaaggagttatcaattcatttattcaacaaatattgttggaaaacctactataggttaaatatggtggaagatcccaaagtgaagaagatccataccatgtttgctactcataagaaatttataacatatagtagagtagaaaaacatgcagaaataataaactatgaagagaatatggcatatcataaagttgattcaagtaaaaggagttacaggattcaagagaaagagcaaagattagaacttgggtctgatttcccccagtttatctctacccctctagagtataagatccatgaaagcagggaccttgcttattcactgtcatcttcccatgcctgataaagtgcttggcacacaaacaattcccagtgaatgaacaaatgcctgttctttccatactataacactgtctcttaaaagcggtaaatgtgtatgtttctcccagcaaacatttatcctcctcacaattatctgttctctcattgactatcctgtgtttaatacattctggtgatatgcaggaggctaatattcttattttactatagctaagcatattcaagcaataggtaaaatattctcatatttacctttcatcttaaagtgtatattttgaaaattatgcattctaaagtatagagttaaaaacatgaatggaaccaatcatattgtttctaacatactcctaagcacatataatatgtatatttttaatatgtgacttggaagatagcatgttttttaataataacacatgaaaaagaaatttggccagtttccattgtaaaatgtttcgcctctagggtagaagttacaatttaaatcctcaagtacacatgctcacaatgtaaaaacctgggaagatttctaataagaaaagtagacatcattatatgaccaaccaagaaatctcagtgtgtttaattatgatctgtctggtttaaaggagaaaaaaaagagcaaaatgaaatgtcatctataggtcatgtatttatttcagtgcaaaaagactggaacgaagtgtgacaacctgtttaggtcttgtgtaaaacaaaatgaagaacagaaagaatgatcacgttaatttcaggcatagctacttgttctagccagagttatttaaacactagttttctttgagtccttctttactattgtgtaaatagaatgtacttttaaaatttgtttagaaattggtataaaaaccattcactttacatattacattcctattagagagtataaaaagtatttttttttttgcaaaaacataagtcaaacagggcaatactaaaagtcagtatttttaatagttttatgtagtgtgttatttacataaaaatgaaaatatgcagatagtggcttctctttttttcttggctaatattcaattacatatattcgatatgttaaagtttgagagtcattagctagaattcattgctgaattctaaaaacatggaataacatatagtatattaggccaaattggaattctgggcatatctaataagtggattatttataggaaataaaatattttcctgcctttacccagaaacggaagagatcactaatttaaacttagggaagggttaatttggataattgtagatatctttggtgttcatatgttgtggcttacttgagtaacatgaatatgtgggtttaagtatcaaaatttaatatccaagtatccatagaaaatctgactgaaaacacagataaagtatatatttaaaattaagtagataatagagatattatgacattttattttgagagatccacacttaaaaattattcagagatgccatattacaaaatgtactgcagctgtttttggcattttcactgtttaagtaaacagattcaatttttaaaatatataattacacatgaccatcagaaaagtagtcctgtgtcctgaattaaataagagatttgagccactgtgtactttaaggtatcctaatgataattacaagaatttttttgcagttaacatcagatttaattaattataaattaatttcgcaacatgaaaagaagttataaagttgcccagtgctggtaaaagttattttttaatttaaaaaagccccattcaatgtaatgccaaaataagtgtccatagtaatggagttaaacattgtaaattttgctgatttgtcttatcacgctgatttgtgactcagtattcagcctatggagcctagagactgtgcaataagtaaaaattatgtaataaaacataaaaattctaacctaatattacagaaataactttgacattttatgattttgtaaagaaaaggccacaaaatgcatcttctggttacaaaacaaaagtctaataaaatgtacctttgcatggctgactttgaagtccttccttataaatgggcaatgcattttgcattttttggtcattttccccaagtgcctttcagttgtaacaatctgagtttagtttcctaagaaagaagcccctctttctcattcgtcacatctaagaggttagagagtatgtttaaacagatatattttcttttcgtctaaccttgtctggaagatataggaaaactaatttgccttatttacatatggcacaatctatccagtattcaagggtttgtcagaaacaggaaccttgtgcatttccatggtaaccgatggcatgctgacagtatctggcttgttgcagcttcgtctaggcaggccggcaattaatcagccatctacatgcacaaaattctttgtgagtgaatggcagcgcgcctctgtagtgctgtctgtgcttttacaattttgtattcctgccgggcaaagtacttttttgtctcttctattcattttccatagctccccaaaatgtgttagaaaagagtatggggggtggggagaagggtaacacaggtacctgtaatttcaaaatgaccttatttcttcttagcatcaaatatgccagggtatgtttcttccttttattctatgcctcatagtgggtttgctttttatttttttctgggttttcttgggtttgtgctagatggtcccttaatctgtgtctcaaggtcctttattgttggtgcaagtagggcatacctaccaaagcaggtctgtgcataaattatggctgggcctgtgtcatgcagtgttgtcttcttagagtccctttacaccacttatctggttctatcttctcagctacgtggaaggtatattattgccattttgcagactgagatgcagagaaattaaatgattcagccagctttaagtttgggatgaagcactccagtgctcttaccactgtgtcaacacagagaggctggcagtccccttttatgtatgatgatgttttaaggtatagaaatcactgttatttcacatcaatattctggcattttctttctcaaaaaatagtgccattgaatttattcagttgggaccttgtattgtctaggatctggacaagagcatgagtaagttaacaatttgggccttaggttgttagtagaaagctgtgtctggattttgcctacaattctgactatgtcacatctagggaagccatctagcttctttctctgtgaaaaaaaaaagggaattgattcgattatcttcaacagttcaccaagcacagaaattctgtggttctccatgttttctaggacattagtttgggtagttaaaagtaatttggataggtcaaaattaagatccataattcgttcagtcttttgtccttgaaagatgacagaataatttgcatcgaattgaattgaataaatttctttttcaaaaaggaaaaagaaagatttgacatctgggtggctgacaaatctcagaaggtcaaagctcattgaaatcagatttggacatttgcatttccacagataccacatagcaaaaatccagttgctttcaaacttcagtttaagcaaaatatcttttaaaaaactaggtatattggaacctagatatattaagtttctgaaaagttttgtgcattggaagaaaagttttttgtcgggggagttttaatgtaaaaagaaaagtggcaagaaaggtgtttatttatagatgaaaatgcatgtaatttttgttattctttagaaatctaaagttattgtatttatttattttttaaaagtcatcttactagtgtagggatgtaaatataaatatatattttatatgcaaccatccttttcataagttcactttttattacatttatttattcaaggaagattattatgtaatttttctttaaatttagaaagtaaaaggagaccttaatttcaaagtaaatcccatttggataatataaaaataaggatgctctttcatacaaatatttgccactcattacttcaactctgtttcattcatattatgaatgatcaagtctctagtacaactgttttctccaactttgtctttttgttaaaaaaaaaaaaagttgaagtgtgagcacaaagcttgtgtttttctctaaccagcgattgtccatccttttgtaagtgctgacaagagcttcacttattcttccatactcagtttctcttacttgtttatgtgctaactataatccactacttaatgttctatttaacattttaacctattttaaaatatcctatttcctccaggattcaattaaatttgtcagtagtattccagaatagaatgttgtttttcttacaattaagtccttttttcttccaatttctttggatatcttgtgtttatacaagaagtgtatctatttttttaatacagtgtggctcatagtatgtggtctctgtaattttgtgctgctgatagaagaaccaggcaaaaactttctctacctggagagtgttaccatgagcttttgcatattctccttcaatttcttcttctatttctccttcatattgtcttgggcctcttttatttaagaaggtattctatcacaccattcacttagtcattcaaccagtatttattgaactccattatttggatgtttgggaatccaccaacaccactactacttaacaataatccaatatatgaaaaatcttttctatagaagaaattattctcattcatatctaacttgaatataacagatatgaaaatacgtagcaattaattactttcagatgtaactttgtatctactaaaactttttcattttctagactataaagtaagaataatagcacttaatttgtagttttgttaggattaaagtgtgtaatgcaccttgcagatttacatactcaaaaatgataggctactggcacttaagtagtcaattcatagcaacaggaaacagaatggtggttactagcatctgggaggaggggggaatgaggagtgactgcttaatggtacaaggtctcctttgggggtgattaaaaactgttaaaatgtacactttaaatggatagatttatggcatttgaattatatctcgataaagctattttaaagctaacattaaagcttggaaaattttacacaaaattccagattgacttctcttgaaaaagcctataatctgacaccaccagccacatggtctctcatggggttcttcttgtttaaggagtacagagtttcaaatttgcaagataaaatgttctagagatctgtttcacagtaatgtaaatatacttagcactactgaactgtacacttaaaatgattaagatgataaattttttgttagggattttttactacagtgaaaatatacatagaagtagttgttcaaaaaatggtagaagtgtttgttgataatgttatgaatacttttctaattattatctgtgtcattattcttactagcttggaagtccttagtttattgtgatggttaagtaaaggcagaaaactctgtattagtagaacctgataatgatatatattagatcaaaccatatacaagcatgatattccattacttttgacctacaaaaatggtaattttatattacttaacctagcacttgtgaaaatatcttaatgtaactagagtatggcttattgatttgcttttggataccttaaaatttaatgtaaagtacactttcttttagctgctttatccccacttcagggccaatatataacatttgatttctggctgttccatttactggttgtgtgatcttcagcctcagttgtcttatctgtaaaaaggagaagataaatagaattgtggtcaagctttacttgattgatggatttactgttgtgaatagtttgcacaatcctttttcctatacattgttgatgtggggaggggaaaggggtagaaagaggagaacagtaaccaaaaatatatccatctttcctcagaatatttctcccatttttattccattccctctacctatctccctggccccagagtcacactcatcctacatgtgcggcagaattcaccttcctcctacctgactctttgtcatactcccagggtccaagcaggagggtgattagaaggggcagtgcagggggttcccatgacctcggtacagattccagcctcaacagtcactaatttgtaatcttggccagccattgcccttgtgaagagtatggagaagatcaggggtttctcaaacctccaggttttaaccagtctaagatgaaatgaggaaaataaagacaatatttatgtagctttaacattttaatctgttttatatttgtagctagatctatattgctataaagttataccagtccttccttaagaaaggctgttctttatactaagattatgtttttctaccttttttttgtttttgcttttcaaatgtcttctcatttatgaaatcacgggcaaatggatgatgggttttatgcaacaacatcacatggcaaaattaaaacctggcaaccctccatcttcccccataaaagttgtactgccttgtaaaagctgaaagtcagaaccttatggattcataaattctaaggattttcctcaatttaacattctattatttgagaattcatttaaactgtagatccttaagtgatttctcggcctgaggatcagagaggtttcatggtctcaatgaaatcagcattttttacaggtttttttccccaaacatctttgcttcaccaatatagaagcatagtaaacttttaagaaagataaattttccttttgcaagttgggttctttgcatatcatagttaagtatgagaaatatgttgggttagagaggggaatacattacctagagtaatataaacagaaaaaaatgcataatcacttattgcatttttatttttctccacacaatgcataatagctggggttttttctttcatgacggttatcactggaattatgcctttactagttgtatggttatggggttagtgtctctcctccttgcaagattttaagcttcatgaggacaatgatgatatttcactcaccatagtgtgtctggcatctagttcatgttctgcaaatatgaatacagtgacatgtgccataagagaagggaggacctaaagatctacagcaaaatcaaggaaaacctttcagaagaaatggcaggtgaggtatccttaaatggtggccagcatttcagcaaacagatatgaaagattacatggtataaactacacttatagaacagagtacatttaatagtgttctaatcctttaaaagttggtaatctctgtatataagataacttctaaataatctttttaaaattatgattagttagatctgcgtaccctaaagccagtctaaaaagaagggggttctcttcatatgaaacgtagcacataggaaggactgggaagtattttcaactaaaggatgtaaagagttaaacattattccaagagtgttagcttgagagaccaacagccacaacctcattgtgattagaaaaaaaaaaaaacaaaaaacccaggaagagaagggcttgagtgagagataagaagctctgtttccatctacctgcaaggtaattgatgaggtagcaaacttagagacaaatcgtaggcatgaggcagtgtgctgtgtgaaataagctttgattttaagtgaatttgtgttttaccctcagctctaccacttactagctggtgacttagggcaaattagttaaacttactaaacctcagttttttctttagtaaaatgaagaaaataaaactccatagaatttttgtggtagataaaattatgtaaaagggactagcacaaaatctaaaccagtagatattaatgaaacactcatttccctccacctttttattgtctacttggtctactttaggtcttgagctttgctcctttgcaggaagatacttattccttggcatcacataggctctttgtatatccccaaatctggaagcaaatatttaaatacaaaagcatctgggcatggtggctcatgcctgtaatcccagcactttggaggccgaggtgggcgaatcacttgaggtcaggagtttgaaaccagcctggccaacacggtgaaaccctctctctactaaaaatacagaagttagctgggtgtggtagtgcacacctgtaatccaagctactcaggaggctgaggcaggagaatcacttgaacccaggaggcagaggttgcagtgagccaaaatggcaccactgaactccagcatgggtgatggagggacattccatttcaaaaccaaggaaagagaaggaaggaaggaaggaaagaaagaaagagaaaggaaagaagggagggagggaagaaaggaaagaaggaaaggaaaggaaggaaggaaggaagggaaagaggaaggaagacaggcaagcaacccaatgagtctaatagtagcactaagttagtttaatctgcagaattgaacctagaaaatcaaagcttggaatcttcacttttgtaaaatgcccaaagcaatttacccatctactctgccttctctgttctttcttcaacttgaaagagaattaaacgtcagatttacagctcagattcaggttactttatgtcaaattctctatctacgtagacaaattcagccaggtcttgctatgctggagcagctttcactgtgggaggaggtggtggaagtattatggaagttactacttatcactgggtgctgagaagcagcatgctccgccattctcattaccaaacttgtagtcagaagaactctgcctgagcccctggtctgctgcttccttgcttagtgatccagaacaggacctattaactttctcagtctccaaaagaaaaatcttgccccttgaatagtgctgacctaaagttaatactcagtaagcattcatgaaatgaataaatgttacagaaagtgacatcagtaattatgttctacgtatttgtgctgtcgtcccttaaaactgtggatataagtccacagtctatatcaagtcaaacttagttaagttagcctgcaccatttagccaggaatgtatgtgctcctgttacaaaatgaaagtaactggcctagaagcctgacacatcagttgtcatctttaatgtcccttcatcatacaattcctcgatggcttcatatatcacctgtcaggtaatcttccagagaagcttgactttaaccatttgttctgtggttcaagtgatgaatgagatgggttagatcatttaattcactatatggcacccaaatgttaaagctggaggaaaagaatgtctgacaaattgtttgttgtcattaaggtttatttctcatatgcctttgatggttcccctcacctcattattgtccaacacacaaagctaactattataaggaagacaatacttaatggatgctagacaaatgatagttggagctgtctggtgcactacctgataagtgagagctaaattataatgtcattagatggaatgcctcaagttattataaagttgtgcttcccacaatgtccttgctttatcctcagcatggttcttcctggcatccgttttcactcagcagctgccttgtttccagaacagctgagaccgagtgttgaatcctctgttatgccaattttaaaatgtccaaccaatactgagaatgtgtgttttgagtattaatgtcatccaaacataaactttaagaaaataaaaacgacatattttacaaatgcagcctttaaaaatttgtaacaatacagttaaaaactttgtataattcacaggaagactgggtatatagaaccataaatccccatttacactatctttttctccaggcacaaattcccttcttagattgttcgtatgacaatttcctacccagtccttacaacatattgacactcagttaataattcaagatgaatgaatgaatttatgaatgagaggaagtacattcaaatatacagatactaaaagcatgttagtgtaaaatattttgcggacaagttgattgtaaagaaaattaatttcacttcatccacaaggaagttaggatttcttggcattttgtgtttgcaacaaacaaataatcctgattattatttaaaatagctccatgagttcacttagtgtttgtcagattttaacaatacctgacaaacagagctctgtatttattcgtgcatatgaagagcaagcttcattattttttggtattaggtagatcaaccagcagactcactcattcagtgaccataaatgttgtataatgcattaatgactccttaagtagagctcacaaaagtaccaccccagtttcttgtactaagtagcatatttcaaatataatttttctgtttcactggttgtgaatactactaaatcagatatatctgggtttaaatcctggctctaccaattacaaacttcttcaactctatgcctcatttcttcatctttaaaatgagaataaaaatcataccatcaaagagttgttatgaaaattgtttgcctgtaaagaatttagagcagtgtctggcacttagtaggtattcaataaatgttagctaatgttgtagagttgtaaataattttagtcttgttaattttccaaagtgataaagcaggaagggttaaaggcccctagttcaccttaggtcctgcctggcccttaagccaatgtaatccaaaagaaatgtgagagccacatgtgtaacttaaaatattttagtagtggcattaaaaaaggtaaaaagaaacagataccattaattttgataatatactttctttaaccctgtatatccaagaatagtaacattttaacatgtacccaacataaacaatttaataaggtattatacttttttttttcttactaaggcttcaaaatatggcatatattctatacttttagcacatctcaatttgggagctgagttttgattaggaagagttggtttcgattacataaaatttacagttgaacaaatgaacacacatccaagttatttcaaagatatttagaagtttttacattaaatctagttcttaaatttaaatttaaattaataaactcagtttctctgtcccactagtcgtatttcaagttcaccatagttccatatggctagcaccacccaaattagacagcacaatcctcagcaatctcaagttgaacatacccaagaccctgccactccacctatcataaagctgaactacattttaagctccggtgttaggatacaggaggtttgagcaggatgttacgaagagaagaggctgagtctacatgacatcgtaaatctgctataaaagtgaagacacaatggtgaaattggtggtgagggattaaggaagccaaaacatattcatagaaatagaagcttcagccatgcatggccctatggaatgcttggtcccctctgtgcctttttctgcactactcactcctgatggtttctttttttccttttttttttttttttttttgagacggagtctcgctgtgacacccaggctggagtgcagtggctcgatctcggctcactgcaagctccacctcccaggttcacgccattctcctgcctcagcctcccgagtagctgggactacaggtgcccgccacctcacccaactaattttttgtattttgagtaaagacagggtttcaccatgttagccaggatggtctcaacactcctgatggtttctaatgggcctattgacctgtaattagaattctcaggaagatatcacaaaccacattagcactgtttttaatttatgatcaataaatacaaatcttcaggcttgagagtgagtgttccttagaaccaaagttgactgaatcagagggtttgtttgttggtctacttttactgagtacattccactaaaaaatttaactttacaatataaatctttaaaaaataggtttaaccaccaagcttatttattccttcaacaactatttggtaagtacctactttgttgcaggctctccattaactaatcaagacacaatggtgaactgtaataggcaaatctttttcctcatatagcagtgtctggtggggctgtagactagtaaatacacaactgcatttcaaggtgacatgtcttggcaatatggggactattcaggcacagagaaaagatgcctacgcctgagatgaggcactgagggaggaagtcagaaagacttccaggaggaagtactgtctaaatggatagagaaagagaaacaaagacttattcagggaataaactttctttttacaaaaaaggactagaatgtcaatgtctgggagaatggcaaagagaagaatgtgcaagaaaaattcaatgtggctgaatggctgaactattaggatcagggtcagtcagagagattaggctggggaagtgagcagaagtgaaattatccagagcctcatgagcacattggagaaccagtgaacagctgaaaaaagcatgatcagatttacacctaagaaccatcatagtggctgtcatgtggatgatggagtaaataggacaagaggcagagaagcttggtaaaagacagtgacgctgtaatctaggtaagagatgagagtggtctgaaccaaaactttagcagtagggatggaaggaagcatatgactggagggagatttagaacatagcgtttacaagatttggcaatagactcgggtaggggggtgggcagcagagcccaagtttctggcttggtagtgttcccattcatttgatcagggaagagaggagattgaatagtttggggagaacagttcagatttaggcatgttgtattgagagatgtttcggataaactagtatcaatttccacttggcaggtgtgttagaccgttgtgcattgctataaaggaatacctgatactgggtaatttatgaaggaaagagttttcattggttcctggttctgcaggctatgtaagcatggctccagcatctgcttctggtgagggtctcaggaagtgtacaatcatggtgaaaggcaaaaggagagcaggaaatgtcacatggcaagagagtgaggggggaagtgccacactctttgaacaaccagattttgcatgaactcagagtgacaactcattcattaccaaggggatgacacaaagccattcattaggatgtgttcctatgattcaatacctccactgggccccacctccaatattagaggtcacatttcaacatgagatttggagggggcagacacattcaaaccatgcagcaggtatatatctacaagtctgaagctcaggtaaaaaaaaaaatcagactcagatggaattcttggaattgtcagcctgtagaaagtaactgaaacagtgataatgtgtgaggacaccagggggagagtataaagagaaagagatcaaaggccaggagaaacccctggggaatgccaacctatatgggacagacaaaggaagaaaagtctgcaaaggagatgggtagccaaggagagaagtggacaatcagaaacagagtgtcaagaaagtcaaaggacaaaagtattccaagcaggaaggagtgattaatagcttcagaaacaagattgttagtgaccttggtaaggctgatttcagtgattgggtcaaaaaccagaatgtagtgggttgatgagaaagtaggagatgaaaaaaattgaatttcttgtcttcttgtctaaatttctcatgtaaattttcaatcaaaaatcagtgtaggaagggagaatattgttttttatgcagatgttgacagcaactcttagtatcacacttctgacctcagccaagtgttcttggccctccatgtccattggttctgcattcattaattcaaccagccagactgaaaatatcttaaattatatatataatagaacaataaaaaatacaaaatttaaaaaatacagtagaacaaccatttacgtagcatatacattgtattaggtattataaataatttagagatgatttaaagtatacagcaggatatgcatagactctatgcaaatactatgccattgtatacaacggacatgattacccatggattttggtatctgatgggggtcctgaaacaaaccccccataaataccaagggacaactgcattccagtttagagcagtcattaaagtctaatgtaggataccaaggctttgtttagtcattctgttatcagtgctggaagtgaagagatgagaagactggtagtaaatctagattcttggaaagcccaaaataggaatggagagtaaaattcttcagtattcctgtatttccctactggagtagaacaaaaaaccaaacgccgcatgttctcactcatagatgggatttgaacagagaacacttggacacaggaaggggaacatcacacactggtgcctgtcatggggtggggggaggggggagggatagcattaagagatatacctaatgtaaatgatgagttaatgggtgcagcacaccaacatggcacatgtatacatatgtaacaaacctgcactttgtacacatgtaccctagaacttattttttatatatgtatatataaaaataaattctctcatagggaaatccctagtactttccccctttctttctttctttcttttttcttttttttttttttaggtgaagttcctgttcttgttgcccaggctggagtacaatggcgtgacctcggctcaccgcaacctccaactcccgggttcaagtgattctcctgcctcaacctcccgagtagctgggattacatgcatgtgccaccatgcccggctaattttgtatttttagtagagatggggtttctccatgttggtcaggctggtctcgaactcccgacctcaagtgatccccctgtctcggccacccaaaatgctggtccccctttcttaggattccgcctttttgccgtaggcgttctccttttatttttcctttgtaaaattccttgttaaaatataaggtctttggaagttcttagcatctcaattaaaagttaagtttcattagagcaaataagagatggaatagagaccagaggaggaaagggcaagggcagaggcaaatggctacaaaatacgactttcttttactgaacaattttagtgtcagttgcctaccagcctcactgatacaccagttatacctattgaaagtcacatgagagccacttttgtcacatactcagttaccccaattgccatcctctggtaaacataaggaaaaaggatcaatctgatgaatggacacattgcaagggggcatttctaagaagtactgttttaagaagggcagttgtagaaaaaacttgggggttcacttctaatttttttgaaactagaattcagctagaagattgcataatgcatggatatatgaataggtggatggatggatggatgttgaataggtgggtgagaagaagaaataatggaaagaaggaagaaaaaaaggaaggaaaggaagaagggaggaaggaaggaaggaaggtaggtgagcagggctcagaagaggccctgtggccgttattattgtcgttgatgatgttttaacgtttgaacttattacatgttattcacatttatggtgggaaaagcacaggtctaggaatcagatgactattacctcctgtcttgtgttcttagaaaattcacttccattttctgagcctcattatttcatctgtcaagtggcattatgctatgcacattacagggatattataagcataatacatcttttatgtaaggatcatatatgtaaattatgatgcactatacatacattagttattgttctgcatctgaggacaatttatcttcctagaaggaggattgctcggatataacctattgtgaacaagtgtgagaacttttaatacactaatagccttagacctcaaatcctggacagcttattagtgcttattagtgcccatgtagtaagtcctcactaactcctttgagcattttgtatgctataatactctttttttgtactgtttttagttatttcttcactttcctcaaaaatgcccactttttctcttgcaagtgctttctccatgcttagctcttccattttataaagtaaataatcttatccactcccacccactgacatacttttaaatcactgctagtacttgagcatagttttgtgcttctacttactctcgggaacactatgacaaacctactctgagtgctaattaggaccaacttgagcatacgtaagcagccctttaactgttttctttgaaacggttccagttagtccttttaaatgaacttcagaaaagaactcaaattaatttgcttctcaatatcctatggttcagacattggatttttttctccctagcgacttctggttagcaatcaaagagctgcttttctacattaagattttaactcaacttcctgggagtggaaagactcaattatttcttcaaaatctataactgttttttgtcttttacatttttagctttcccgaaatgctttccctgctcattgaagctacctcctgttccgtttaagttctcccttgatgacgacatttcttatgagaagccttaccaaaaagtctaagacaggcggacttctgtggggattaatttgttcataacaattatgattggctacataatttgtgggttactgggcaaaatgcaaatgcaggtatctttgtttattaaaaaattactaagagtttcaagatggcaacaacaaaacagcaaatatgggacctatgcagctgcacagattacacacccatgaagttagccctacgtatcattgtgtgttgatacaaactttgccatcatggacttcacatttttaaatacatatatgcctttgataatttctgcaataggctcctactagatatgcaaactcaatctacttggcaacttttcatcactcagttatttcactgttatgcgaattttctgacacctttatttttgtcaatgcttaccttagctttgggttatgagattaattggaatgtttaagagaagttgaattcttatacagtcatattttagtaattgcattaaaccataaaatgtatttattatagtttcattggttaacacaagtacatctataatgttgagaggttttacagtccaaaaacactagagcagcataagcatgagagagtatgcagtctggtaaaaccccagaagcatttcttgcatgtttgagggcaacctacagtatctcagttgattgtaaagtatatttaatgctaaatttgatggtatcattacagtgccttagattcttacatgcatattttcagaccttctcctcctccacctgggcttgccaccacttagcccagcaggatgctgagtttctaggcttatgtgctaagctaggggacagcaagggatgttgattttgctgtatgtggccaattatcttgacctttatgatggatgaagccaagtctccctcccgtttatatctctttctcgggattgtagcccattgcggtcatgtcagtttgtggtcttgtctttcactccccagcaatgcacatcttgagatactgtgattagcatccctaattcataaaaattgacttaccttgttataactagagagctgccgcctaaaatacttccacctactgttcgaaagggtattattttaatgccctggggataggaaaagttttcaacccaccagtgcagggattagttttattttaaagtatttgaagtgtgttagataagttagctaagaatgatccaagttcagttgcttcccaagagcctttaaagatgtgctccaagtccttatctgataacaatctgtaaaaatgcttacattttgtatgtgtttgagcatcaagatctacctctttcatatgtaagggaaaattaagacactttctgcgtcaaccaaatacaggggatgatttcatttggataaatagctttctcttcaaataggatttctgactaaattatctggatttaatcatatgtctattgaatagcatgtgcacctttccttgtttttcatatccctgtacactaagcaaataaaggcatttctctttttattaattgaacgttcacaattgcctgtaaaacttttagagaaatacctaattttgagattcacttaaagttaggttaaagttttatctctaaaagactaaaagggcatcatctcctccaatgacttctattcatcaacttcttggcgggtttaaccagccagactggtttatatgtttagacacagtccgagtcacacagttagtataaatagggttttttcacattaaattactgttttacttttgattaaagtaactggacttttcagtattaatttggaaatggtgtattttctgttttatgaaaatgtgcaatgatgtcacatgttcaggttatgtgacaaaacatgtgttctcattttccttcatgcttcttcacctggacaggaaagggtaacgtgatgtccccttgatagcaacagcattggttagaactggtatcagagagcttccatcttcttttatgactgtgactgcccttgctaagtcccatttttcaaagggggaaacttagacatagaaaaaacaaaactatattgttaagtcaaacagcctagtcaaatagctgttccacttctatgagtttctaaaatgttctcctattcattctattggtggttgctcacaattgtacctacatctcttcaccatttcatgtgaaatagagctcttaggtgatacagttgagaagtcaggtgtcatgagtttagcatgtcaaggagtagttactagtcttcctttacagacaagtgattggtacatgttggttagagaaaagtgatttttctagagtttatcactccagaaaaagccaggcacttagagaagcagttattgtgattgcattactcaaggtttgcttgaggaagagagctcttaattagactctgaacagttaacagagaatgcaacagtgaagccaaaggcattggtaggtcagcctcagaactactgattttttagaccagataagtctttgttgtgaggggctggtctgtgtatcgtggaatgttcaacaccatctctggctttacccaatagattccggtactctacctgatcctggttgtaacaactaaaaatctccagacattaccaggtatgaaaaatcaccctcacttgagaaccactggtataggtctttttagtattaaaagcactttgacgttttcaacaactgtgttagggattttttaaatctctgttttacaaaacagaagcttaagctcagaaaagtaaaatgacttgcctaaggtctcacaagtagtgattggaaccagaattcaaacttatgcaggtcttctaaagccatatcaggtgctcttttcattacaccactaaagaaacagatacaatatcactgacccaaactacttcttctctccctgtttcttctgctgttatttgggtttcctgggctttatatacatactactgagccaaaataattctcatcatcccaaaggtcacttaacgttcagcattttagtaagacatcaatttctcatttgatctttcatcccaaaagctccaccatttgatacgttgacagaataaatccagtacattgacagcttcagaattaaaaaaaaaaatcttagattttattaaggtgaagaaatcactgtagtaaggttatagatctaaatttctttttaacttaaactttcttaacacatcaaatccacattaacaattgacacacaaaagttgattgagtaaaaaataggttcaccttttttatgtcaaagttttggggcagtcaagaaaagaaacttttgaaaagtatcctcaaatgcaaataaataaataaatgcctttaagaactaaattcaaacagatctgtgttggctcatttacatatataccatgatcactaaataccaaggcctgtgttatagtaccaaaagtaaaatgaagcgtccctgtttagtttgccatgagataaaatatggtttggtctaaataagtaagttggcagtggtttctaaggattatttaggctccaaaggtcatttgattccaacgatagaacctatatttaggcccgcagtagcagcaaaccaatctcattgtgacttagagttataatctactcagcaaatatttcagtaaagacactgaggagacttttctaatttccatttgagatctttctgttttaaaaagaacagtatgatcctgcaaatcatactaaagacacagaaaagtctctgcttttagatgctagtggcattttacaaggcttaaagagtaatagaagtttggcagttccttaaaaagctaaacatagaattaccatataacccagcaattccactcctaggtacttacccgaaataactgaaaacagggacttatacgggtacttgtatgcagaagttgatagcagcaatattcacaatagtcaaaaggtgtacaatccaagtatccatcaagagatgaatgaataaataaaatgtggtatatacatgtaatggaatattattcagccataaacaggaataacgttttgatacatgctggaacatgaatgaatctttaaaatgttatgctaaattaaataaacacaaaaggacaaatattatatgagtacagggatgtgaaatattgaaaataggcaaattcatcgaggtggaaggtaaattagaagttaccagggactagggagaggagaaaatgaaaactcattgtttaatgggtacagagttactgttctgagtgatgaaaaagttttgaaaatagataatggtgatggttacacaatacatcatgaatgtaattaatgccactgagctgtacacttaaaaatggtgactataataagttagtgaggtgataaatatattaattagcttgattgaatatttctacaatgtatatataaatcaaaacatcacactgtacccataaatatacacaattattatttgtaaattaaaaataaattaaaaatggtgaatatggcaaattttatattatgtatatttaccagaaaaaaataactaggggaaatattttaattttatgatgggtaaatggctaaaattcctaatatataaaccaatttcaaagtcataaggaaaagctcaatatcccaataaatttcagacaaagaaaacaaataggcaatttacagacaaagtatagttaaaaaatacatgaaaatatgataatatatatgattatccttgcccataataaagtaaatataaataaaaacaatatattacctctttttccctaagcaaaaatgtgggtaacaggtactgtggggaagcccaggagttgtccatctttttataaaatagtgtgcaaatgttgataatatctatgcaatttcttattaatatttttatcctttcaccctgtaatccaactgttaggaataaaccagtggtcatcacatacatgtgtaaaaaggctatgttccaggatgttcatcacaaaacatagatgtcacacaataggaaagaagttatgttagtcatggggcatctataatgtagaatgagtacggtgtcaccattacaaattatattaaggagaatgttaaatggcaaaatatttagtggtctttacctatattttttaccttgacacatttagaaaatatttatgccattaaatattctttcaacatcatttttaatggaacatggttttcatcatttgggtgtattatatcatactaaactagtcaacttattatcagacattgtggttgttttcagctcctgctattatgaaaaggttgtcataaatatccccatacctctgtacattcttaggataaggactttccttaagataaattcctaagagtaaaattactatgttaaaagtatgaaatgttaaggcttctaattcatattgcaaaattgctctcaagaaagatactatcaacttatgttctcaccagaagtacagaggaatactcatttcccagttccctcatcatcactactatcatttttaaatcgatattgatggatgaaaatcgtatcttgttattgtttgaatatgtattctgctgattactactgaagacaaactcctttcatgtaattattgatcacttataattattctttagaaatttcctattcttgcccttggttcatttttccttttgccatgttaatttttttcttattgatttataagagctcttcttatattaaaaatattacatgaatgctcatttgttatactttgtatcttctacaaaatctagtaaagagataggcaagtggtgatatttctttacaggagagctttatacattacctgtgattaaatcaataatatgtatttcttcatttaaaatattgtgcaaattacattatttctctttactgaattttgcttgaagcactgaatgtgacaattttagtatttcagaggataaaaacagcccatgtctgactgaagaaattcaaagaaattagtgctccttaacaacaaaaaaagtggggttatagagagtgaaaataaactttaaaaattctaaaaggcagaatcactaagagaactttgatttaacagaaaaaagtgtgatttagaaaagagcacttttgaaggtatgaatggtctaagcactgagttgtgttcctctaggtaattaaagaggattataaattttttttaacaagagcaactcaaggggagcagagattgggtcttttaattttgtgccaccggtgctaaatacaactaagctcagtgggaaaggaagaagacagtgggcctctggcccaggcatcatactcacccagggcctccaatgggccaacacattgaatcacagagatattccgagaggtcagagagaagacatagtgttccagtaccatgccatgctacctggacggccctgcaaattgaaaattgtataactatatttttatatagatagtcatatagcattatattgtgggtatatatttatagcactagtgtgttaggtgtaatcattttaaatataaaacaattttgataactctcttttaaagcttttttaacaaatgaggagcctcaaaatatgaaagcgactgggctttgtctgacctttgagaggcatttatcatggattaacaaattggaaatgctgaaaatccccttatagggtttgttgatttgcagattatttactgggaaatgtaattgagcaatgctgcgactggcctgctacttgtgattatgggggcctcccaggggatcatattaataccaaaattacttagctttttattaatcaattatgggcttctttatttaggggatgcagagagtttgcagcagtagaaaatccactagggttttaaaatttcttattaaatcttctaagggatttttccaaaatgtagttaataacagagttctatgacatgataagctaaggaaaagcaaagtataccatttgtaattctaaaagaaaattatgggtaacttaactccaaaagcaatgataattagaatagcaagaggtgtgagatagagtgaattaaatactttgggcattttgtggttattttggagaaatcgttaccttctttaatcatttagattgtgtgtgctgggaatgcactggtgattaggggtttgatagaggtctaattcgactctggatgtcaacaggatcacaacactagatagtaaatattgcctgttaactgatgatacctgtgtaacttaaaatgtcttacaagttgcgtcttggacctcatcaatatatttatgctaataaactcatttgtgggagggaacatcatgaatttctctttggtagtttatttaattttctctctttgatttttttttcagctctctaattctttccagtccagatggactaagatataaacattgaaactggcgtttctgtttgcctgtttgcatgctttagaaaggctagcctttttggttgattaatatcaatgtaacaggaaaatagttggttggtccagtggttaatacaactttcctgagttaacggtatcactgcacactgattagaccatccaagatacatagagggaagaacctggtactggggaaaagggagggagtcattcgtgtcatcaatatgctttgagcctagtatgtgcctgatgtattagggcaccagatgccctgggtgtgtcatcttacctgttacatggccagtccaaacagttgctaaactcaactctcggtgttcactgggaagctgcaagttcaaagttgggtttgaaattatttaaattaagggaaaatcatgtgaatgaccaaaaaaaattctcatatgaatttccaaaacctaaaattatattaaaatatgttaagtcttatgaatgatgtaactaccttaaagtaagttagcattttaaaagctgtttgctatttatagcacagatactatcatttgcagtagaaaagtggcttgttctttagtgcctagaaaatcgaccaaagcattagagaaatgcaaatcaaaaccataataagacaccatctcctgccagttagaatggtgattattaaaaagtcaggaaacaactgatgctggagaggatgtagagaaatacgaatgcttttacactgttggtgggagtgtaaattagttcaaccgttgtggaagacagtgtggctattcctcagggatctagaactagaaataccatttgacctggcaatcccattactgggtatatacccaaaggattataaatcattttactataaacatacatgcacacgtaagcttattgaagcactatttgcaatagcaaagacttgggaccaacccaagtgcccgtcaatgacagactggataaagaaaatgtggcacatatacaccatggaatactattcagccataaaaaagaatgagttcgtgtcctttgcagggacatggatgaagctgggagccatcattctcagcaaactaacacaggaacagaaaaccaaataccacatgttctcactcataagtgggagttgaacaatgagaacacatggacacagggaggggaacatcacacaccagggcctgtcgggggatgggggtcaaggggagggagagcattaggacaaatacctaatgcacgtggggcttaaaacctagatgacaggttgataggtgcagcaaaccaccctggcacacgtatacctatgttagaaacctgcacgttctgcacatgtatcccagaacgtaaagtaaaaaaagaaaaaaagaaaagacagagagagagagagaaagaaaaagaaagaagaaagaaagaaaaaaggaagaaagaaagagaaagagaaagaaagaaagaaaaagaaagaaagaaaggaaagaaagaaagaaagaaagaaagaaagaaagaaagaaagaaagaaagaaagaaagaaagaaagaaagagataggaaaggaaggaaagaaggaaggtaggaagtcaatcgaccaaagtggaaagatgtgattacacatgtagtggggaaaacataaaccatggatttcttagaaattttaggaaatagagactagaagtggagtgactgcacatatttatctattctagtggtcaaaaactaaatgcacttaaggcaacaatatcaatgtatacatacacgtaaaacagacaggaattgacccatgacttggaagactcagcctcacccacctcaccctaatccaggtcctgaataacaggttcccagtcccataacctctgacaaccatttccgtcccccatctctgacaaatgaggcttgggttgggttggagggtagtcccagaatcctgagctggactggggacttactgcctacagccgtactatgttgcccaccaggggaaatactagaaacggggtcctcagaaaatgataggtgagaaccagagtaaacagcccagatggggtcattttccaaatggagctaaaggtagaaaggcagccaaggtataaagttaaagagacaaaggctgctgctgaatgaggaggaggggagattagcctgcaatattcctgagtcatctgtggacatctgcagtcttttcttatccattttccacggctgctgtgagagctccatcagctttgaagttatggccagagacaaaccatttatgtgtttttggcacttctaatcatctgacaagacacacagccaaacccgtgtacttttccccattgtagtcagccttatgctacctttaattcagtcttgaggcaagtgagttcaagatacttccataagtggatgacccagagtgtgagatccccagtgaggaggacacttgctactgggttgaaaatcaccccttagaagagcctccatgtccgccccccaaaaaggctgagtgacctacccagagaaactggtagagctgtgagtcaaggccatgatggctattaagggacagtttgaaagctagacaaacagctttcgaatagcaaacagctttcaaaatgctgacttaagaaaattacatccttcgtaagacttaaggttcaacaagattagcagtcccctgaacaacaaaaaaacaatttcttctatgcattttcaaaacccacctgattccaaagctgaggctttttctattgagcatgaagatcaggtaaaaacaggatcagggaagtcccattcagaagagtttctgcacacatgtcattagctccaccaccacaatcaccaccaacttcgcaggggcacatttccctaggatactttgtccaatgagcaaatcaatctgaaaacaaaagccccttgtggaaatgttcattactaagaggttttctgctctttacgatgaaaactgagaaagttgacgctccagtttccaaatcagccttgatcaatttctgcataatagtctgggtagaaggtacaaatgaagggtgggggggcagggaaagcaatattttttattacttgcatttgtttaatttctcaggatactattattaatagactgtacttttaggagaagcaaattcactttatacagtgtttaaggaatattgtatatgtaggatcaaatgaggggaaaggatagttttgccaaaggcaactgttatcaaggttctgaaattaattggatgctttaattgaggtagattactagctaatgcttgcttgaatacagtaattctcctattaaattatctttgaataattacctgaaatttctcagctgcagggactgatggctatttaattgcacagtgatgttgctatataattacttaacaaggtgtcctgtaatagtttaattccccttttactgaaaaaaagtgtatgataaagtaactacaaatactcctttcataaaaaataaattgccgtagttttttcttcaaagattatttgttattttaaagtaaattaaattatttctaaattttttatttataattcaagtattgatgctcttttaatagaatagaggctctctaacatataatacattaggtaacatttcaaaggattggaattgtcatttaaaatgtttacttatcaataacattttatgtcttattgttaaataagacaccacccctttctcttcatttttattattttaatttcaaggttctcaaattaagtatatagacattaaataatgaaatacttttaaaatgtggccatatgttacatgacaatgatattacagacaattaaatacatttcttaggatttttaaataaacaatctacaaagtaggtactttccaccaagacatcaatttattagcatttaggatattgccacagatgttattggcatgtcaatgacgaatatcaataaatatcatctgactcttaatcaggttaatctaattgacccctatagtaagcataatctgatacaaaagtcaaaagcaaaggacacacattttgacaatttttctttcttatgtaacttggtgatataaaactagtaaaataatcaggaggtcatggctgattgggatgactaaaagagaaaattattgtcagtgcactgccagttttagcatattaaatatagttctagaatttgtcctagaatagttttatattgtatacattactttaatgcagaataaaatgcttgttaagctggataataccaaaaattgattggaaaaaattaaaattgaaaattattttgataaattaagagaatggattacatttacaagatgaggcttgacagattcaaagcaattttattcacatagggaggatagatgagaatgttctatttccagcacagcaaaaacagtactgagtcattgtgaaaaactagccaactgtgagagctcatataaggtctttttttcctaaataaatctaatactgaaatgcatagatgggaatgtaaaatatggaaatctcaccatcctaagcattggttgggactgaaccggtgaagacaaagccagtttccgattttgtttttaaatcacagctcacagatgtaatatatgcatcacatgggttaaaaaaaaacaacttttcagtatctgcaggttatttgtcctggctccagtataaacagtttcatcctactgagaatacaatttttggattaggtgaaaatatagaacagaatacactttttgattattgtgcaaggaatgtaagaaatggagaagctccatactttgatgaaattatcctcatctattatagctacagatggacaagttgcctgagaagtataccagacagggaaatgtaccgtgtgatgttagaagattttccagtgtgccagaagtccataatccaacagccttttcctatggaagtgggtggaatgaattttgcagctgagtgaaaactgggtatcagccaggaaatctttgaaatctttaagatggagttctgaaattctgaggaagcagaggcaagatgtttgattattccagccttttggccacttaaacaacatttcaaagccaaggccaacagaaaccagttcctacagagtgtcagtaagagagaacgtggtgatgtggctgaggatgggatcatggtgtgatggatatggtggagattgaagtagggagatgcagaaatgaagggatgttcttgatgatccctaaaatgttgtgtaccccaagatccgaccctttggatgatcatgaatattatggtcactcttcaggttttcattttatttttttgccaatatctttttgcctttacctgaatggtcactcttttgtgatccatgtcacttttgtatacttctggttttgaggacagactgccaaaaggcaatatgagtctgccactaaccaatgagtaaaagggaagtggataaagtactatttctgggatgcattctctccacattgcagacacctggccaagcctatgctgtgtttgtgtgtatgacacaccctctcaagcagctgtcccactaagatgcaagggcagtattagtcaagacacaacataaccatcctgagacagtgggcccatttgcactgtgtacacttgaataattcatttttctcttaagtagtagtactacagcaataataaaaacatagcaacagccaggcatagtggctcatgcctataatcccagcactttgggaggctgagctgggaggatcacttgagcccaggagtatgagaccagcctggacaacatagtgagatcctgtctatgcaaaaaaattttaaaaattagtcaggcctggtggcacatacctgtagccccaactactcaggaggcagaggtgggaggctcacttgagcccaggaggttgaggctacagtgagctatgattgtgccactccactccagcctgagtcacagaacaaaatcccatctcaaaaacaaacaaacaaacaaacaaaaccctagctacagcaatttcctgtagacactacaatttcttatttttccaaacaacaattgtggataaatttttcttttttcattcaggaagtatatcatgtgctttaccaggaaatatagtatcattatcttttttggaggtctttattttatttatttaaagttggagctctattccaataacatgatttaatcaatgggtgtggtagtctaacaccactattgtgtttgacttcagaatcaactatgttcatttttaaaaatagatgtagtccttgaataaaatgaatagtctgattaattaaaaatgtacttcttttttttgtatggtttttcctcagatggaaacatgtatctcagaagtaattatacaggaaatcttccctctactcacatatccgctcactcctaaaataaaataaaataagatttcttcatgtggttccagaaggaaagtggtatcatctctgttccttgtctcaataatgcatcttctgccaaaagacaaatgtcaaattaaatgagcaagacgaaatagaaatgtctttattaggagcaagctgctttgtcctgcagggtatagatgtgtgtttacagtagtgtcactcactgttcagtgactgagatcaattcttcattgggattcacattttgaccataaatgagagaccacaattaggtcgaactttgatcaattttcctgccaacagatctggaatcacattttaagcctgatctgagctcatgttcttcctttatttcagcacaaaagcttgggaccacagcatcattgaatcatccttgaaatcatttgtgtttcactagtgatgtgagatatggcaattctttcatttcacaaactagatgggcttttttttttttttttcactttcatctaagtagaattacctaacctttcatggccttgttctctcgtctgcagacctagagttttagactgtgaattcccaacttcattgtgtttaataatcacctgggagctttaaaactgcattttcctaggtttcaccacctgtgattttggatcagttgagtgggggtggggctcaggcatctgcatttttaacaagctccccaggtgattctgatacaggcagattatactttggtgaacatggctatagatgatctctgaggtcttttccagatttttacctccgcagtcatttgatgaaatcctagagtgggaagttctcctaaagagtaaatggaattatgtataaattgattgagcaacagagatgagatagtatgtcaggtatgagatagtatgttgattgagcaacagagatgaggtagtatgttagtatattaaacaactaacgtttgttgggcatttttagagtttcagcaagccttatttttttattttttattttattttatgattactttttttttttttttttgagacagtgtcttactctgtcaccaggctggagtgcagtggcacaatcttggctcactggcacctccgtctcccgggttcaagcgattctcctgcttcagcctcccaagtagctgggactacaggcgcacaccaccatgcccggctaatttttgtatttttagtagaggtggggtttcaccatggagcaagccttattttaagcccttcataaatattaacttactgaacctcaaacaatatttgaaggcaagtagcatccttacatccatctgatgagtgtgaaaactgaggcacaaagaaatgaagtcattcgttcaaaagtagatgggacttgtggaagaggtagaaactcaatagcctgaaaagggtgctctaggtggagagagtagaaggaacagaggctcagttctgttaaaactcaataataattcaagatatcaagtggttggcttatttcagttagcatatcttccaggttcgtccttcttgttgcagatgatagattttaccccatttaaggctgaatagtattcttttgtgtgtgtgtaccctattttttaaatctactcatctgatgatggacacttaggttggttccataacttaactattgtgaatagtgctcgttaaacatgggagtgcagatagctcttcaaaatactgatttcaattcattaaagccaagcacagaagatcaataccacaggatctcacctatatgtggaatctaaaaacgttgagctcatagaagtaaagagtaggatgatagttatcagaggctaagggaggggagtggatgggaaaaagggaaatattgatcaaaggatccaaaatttcagttagacaggagaaataagctttagtgatctattgcacagaatggtgactgtaataaataataatgctttgtatatttcaaaattgctaagaagagtagattttaaatgtttccatcacaaaaaatgataggtatgtgaggttatggatttgttaattagccaaatttaatcattccacattgaaaacatatatcaaacatcacgttcccaaatgatcattgaataaatattacatttattatatatgtagtacaataaatattataattataataagtaaatattacacttatataagtataatataaatattaaaattacattataataattgtatatacaattattgtttggcaattagaaataacatcctttaaaaagaatagcaagtgctcccatgcctggggccctagtcccactttgggaaaagtgtgaggaaagaggcaggaggaaaggagaaaggatggtgagaaagtttagacaaagctgaaaaggtagctcatggtctagtttattaaagtacttggatgttagagaattgggggatttttttactttttacttttttcttttcattatacagtcaaactcaaactatagccccaaataaggccagctgtatttataatgcatgtatcttttattaaccaataattccactcctgaaatgttaagttcacaagcagaaacaggcattagaagatatgtacaaggcaatttctcacagttatttgtgatgctaaggaaagttttgcaataaatttttgtgtatgcacataatggaacatcatttagccattaaaatattttagaaaaatacttaatgatgcgaaaatgctcatgatacaatgtcaacactttaaaaacaggttatcaagcaatatacacactagaattctaattttgtgaaatatgcatatataggtatatggttatgtatgtgtattgaaaaggctgaagcattagcagggttttaacagaaagttggatgcttatgcatgatttttatttttgcgttagtccgtttggactgctataacaaaatattatagactaggtggcttttaaatatttagcatcatttctcacagttctggagactggaaggcccaaaatcaaagcaccagcaaatttggtatctcatgagggcccagccctcatagatggcacattgtatctgtgtcctcatatgttggaaggggccacttagctctctgggacttctttctaagggcagagcccttatgacctaatcaacttccaaaaggccccacctgttactactgtcgccttgggtttcaacttatgaatttgggagagacaccaatattcagacccttgaaattttctttatatttttccatgttttacaaattattctctttgaattagtgttatattttattttatgaaataagtgcaataaagtatattgtttagaaatgtttcagtgtgaggccaggcgcaggggctcacgcctgtaatcccagcactttgagaagccgaggcgggcggatcacgaggtcaggagatcaagaccatcttggctaacgcggtgaaaccccgtctctacagaaaatacaaaaaataagctgggcgtgttgttgggcacctgtagtcccagctactcgggaggctgaggcaggagaatggcatgaactcagaaggtagagcttgcagttagccgagatcgtgccactgcactccagcctgggtgacagagcgagactccacctcaaaaaaaaaaaaaaaaaaaagtttcagtgtgagttaaagcaaataagattttctaataaccaaggcaattaattagtaaaccccatttttgtgcacccagttagatgcaatgatttcagttttcctgtgtaattgcttcaacatcattccaaagtgcctttattttgggcagcactcacctgtatggaaatttaggaagatagtgttgtgttcatagttgatgggaagattgatagtgtttcctcaccctgatgagaattcaatgatgtggtgccatgccatggcacaatagtgtatatgtcatgggcttaggaattaccttttatcagggcagagatggtgaagcaattagattgtttcttcattctcttttggttgggcaatgtagaaagcaactgtggcagtggtaacaggccatttatacaacttcataggccacctgtggtcaagccaaatcagtattcactgaaaaaaggaattaattattctttacaaaatcatcgtcccttaaattttaaggaactttgctcaagagttactagcacttgtagtctaggtatatttttgaagcatatgacaattgtgtggatgaaagagtgatagtgtgcttgtagacaatagaatctttggagttggaaagtgtggtgccattcattctggtgacaggattctgggtgtgttctctgaagctgctccatagtgttagtcatgtgtaggtaaataataaaaatggcaaacccattcagtgcttactatgtgccctaagtgttaacttgtcatatattcacagtgaccaccatgatgtaggtaacattattatccccattatacctgtgaagaaactaaagacatggcgaggtttagaaacttgtccaaggtcacataatcagcattacttagtgtcttgcatgtgacaggcactagtacctcagatcagcatgctgaagcattgtactataagcaccttgcagattttaacttcaagccttaccacaatcctgagatgtatcaatatgtccattaatcagatgaggaaactgaggctcattttaagagaccatacaatacctaagagagaagtgccaggtgggaagaagcaatgtgtaagtggcacctgttctttctaccctgagttaccttttcctctgctccttgctcttcacagccctccataatatgattgttctaccctttaaaagtctggtccaaagatagatttagacaccatcaagaaacacttttctacggctcaggcaagaagaggagttcacgtctctagagtcagacagaaattgttgaatcccaactctgccacttattggtggtttgactttaggaaggtttcttaatttctcaaggcctcattttccccaactgtaaagtgaagattacagtgatatgtcatagagttacagtgaggattaaataaaatcattttaataaagcacttaacaaagtgcttggtatatttcaagtactcattaaatagcaacagtaataacaataacagaaaggatgttgtttttaagggaattcatcaccagatcagtatcaaactgtgctccatgaatcagtagtttcttgaaataataatggaactgtctaaaaaggagaaagagggtcataaagcaaaataaaagtagaaaactctggtttaaacaaaattaaacaagatttttattgtagaactcttataagcctttaatagccaatatattggtagagctataagagggcaatagagaaggcaagacttcctaatccatttgaatagttctatttttctggggggtccattaagtcctggggactctttgggaatccctctactggacaaaatcctgagtatccattacatttttccgagaagtagggaattctattatgcttccccatcagagattttgaaatagagatgaaaatagtatattctatcattttcaaatttgtgtaacatcccatgtgcttaaaaaatactcctagggctttaggaaaagtggggttgattccagtaataattaatattaactaaaatagacccacaaactatcaaaaaccacaagtttaataacatgaaacatgtatgtagcagtactgaaccactacccaaccctctcctcaacctggaacgttcttctctactctgaccgttccaaccctgcttacctggttaactcctaggcattctccaggctcactgcagatgccatctctgccagcaagtctgttctgtataagatgccccgtagcccatgtatttgccccgtcacagcaccacaccaaaatggcaacacgttgatggcagaaacaatgtcctcttcactattgagtcccagggactcacatagcacatggcacaggatcagtgccaaatagactttagtgagctgaatctcagcacaaagggcaaagctagagttggagatgggaagagagaatcctacatgggggaaaaaaaagggagaggctctggggagcagaggcctgatggataacacatgcaggatgggcttcaggttgcaaagttggtaatagcagcgaatatcctcgtaaccctggggaatcaataaggaaggggcccttgagggtgccaaatagagggtctcaactttgctttgcaccaccttttttaacctcagctgtttctatgtaatcagttagtatgtgcaggaatttttgtcctacacaagtgcatttatttgcatatcgctagaaacaacactagtgaaagtcaacaatgctttgcataatttatgtttctttagaaaatatgagctgggtgtgatggcttatgcctgtaatcctagcactttgggaggccaaggcaggaagatcacttgaggccgagagttcaacactcagcaacatagtgagaccttgtctcaagaaataaatgaataaataaataaaaataaaataaatataaaagaacaatgtggttgactgtgtcttaagggcagctcccagatgatcccttagtagaagtatgactggacattctttacagtagactgggtatagagaggttactggagcctggaaagatttctcagggtgccctaaggtaagctcacagcctgaaccctgaggaacgtttaatagtgaagctcactgcctttctccttatcagccttctcaagtctttatcttggttaacctcaacaccatccacttagatttctaagctggagatctcagaaccatccttgcttccctcctcttccaaaccaagcattcaaagagtcaccaagtacaactgattctatttaagttcaatgtggcattttgttttgttactaaattcttaaatacatgcatcctcatagaaaaaattgatagatgaaaagataaagcagcaggagaaaagtcactctcaattccattgttaatattttctagtattcatgaaattttctatcaagttctgtatataactttgactatagattttttaaatttgtttttttaatctattcttgactctcctgctctccttcatttattgaaactgattttaagacctttcctcatctgaaacaaagtatttcctgtccctaaagacagaagagtaatgaaaacaagcgtgaaccctgctttcatggggcccacaaggaatgtatgtaaatctttccttcccttctttaacacaaggagtctcatacagctcatactctttattcctcataacattatatttggaaatcattttatatcaattcctcattcctatttccttgtatcctagcatcataatataaccagccctactgatggatattgatgggtatttaaggtgcttccaatcttttgctattgcaaacagtactacagtaaacaaccttatacataagccatttcatgcatgcaggaccagagctataggataaacccctgagagtagggcttggggagaaattgccaaattgccctccacagagttttaccaaataacattccatcagcaatgtataagagtgccagcttccccaccaccttggaacacttttattctcttcttagaactacttggtggcctggagaaatctcgtagctgatcaaactgaaggagcaggaatgtgaagtggaaggattctcccctctcccaggccaccgagaaacttgtcttaatggaggtctgggtttattttttaagagcctttattccttatagaagaaagaagaaggagaaaaaaacagaaaaacctacaatgctactatgtgagtgccacaaagaggaacagatttctgtcccatgtttccaacgaaaccaaccacttaaaaagatacagggcgccattcagggttgttggagcagtagaagaacacgtagctgatctgcaatcaaatggccactcgggagagcaacctgtgtgcttttacccacagagcagccagtttcaactggaacttatgcagggcccgtttgcagacttctttgtgcggtggttcattccccatcttagaggctggggcaggttaggagagagcgcccatgttgtacaacagtatatctgagctgccctttatgcctacctatttctttccctgctttcacccctttgtgtgtttttaatggggataagtgtgagctatactggagcgcaatcacattgtggtcttaaaagggtctctgatgatagaaaatatgtcaatttattatttccctcaggacagagaaaaaagtacaaaggttcaatggatgatgaagataatacttgtgcactgtatagcattttccaacaaaggattttaaggtgattttcctttaaaaaatattttatattttagtcccattttgtaggtggggagacaagaagatttcgtagtgactaaaatgtcctagtggtgggaccctgcatagagtcagcatctctatgatccttccgggctcttttcactccctctagtggaatttggttcttcacatcagagttttgacagcaatagcaagcactgtgctattgtgtgcgatcttttgggtaccagagccagtttcatcaaatcttcaacctgatggctctatctgtgatcagagctatctcatgtacctacagttgcagtttctttaaataacaattagcgcaggagatcctgggctgctcttgaatgcagggagtatgctggtgaaactcagcaaggaggtggtcacttgtttttttgtcacgcagggtctttcataatgaatcaacaaagcattgacaatagttttcttgtaaactgaacaaaccttataaatggtgtgtggtctcccctcccccatgaattagttcctttgtcctgaaatgtgtggttagcccagatattcattccgctctgctgggagagtggcagagtctagggaggcacccagaatgtgcaagacaagtcgacattttacattttggtcttctttatcagagctggaaatatttcatttgtaccttgacaaatcaggaaaaaaaaaaaaagcatgggtggacagcatagaaaactttcccaagtatctgagtgatcaattttaggacatgaatgtgatagctgcttcctcttttttatgtgtacaatgatgaaaggaaattaagactgtagaaacagtttttaaagtgctttgtatggctgcttgaaattcattatatgattgcctgttttttaaaaacctaaataaggagggctaaagtacttaggagaaaactaattgctttaagcttttcctcctcagtgtatgctattctctgctgttatataatcttggatattgagcaactgaatgaaagaaacagtgtcttacttaaagtaaatggacaaacatcatttactgctggcgtttttggctcttggggtgggggtggggaagatatctcatagtgaagttcaccatagcttagagttcataaaatcaaccttattgtcaaaacactgaaataaaaattcacagaattgaaaggagcaaatctatgtggaggcaggtttttaaaatcttgaaatgttcaagttttgcttcttgtctttacaaaaaggcaaattatgatggcataatttttgacatgttgttaccagagagattgtgtgttggaatgtatattagattaaattgatagatggttgtgtgaaaagaactgcaatattcaaacttgactgtatgcataaaattatttacagaactataccacattaataccatcttatttcatttcagatataattttacttaatggtaatttttataaaggatatgaatgtgtttttcttttttaaaaaagaattgccaaaatcattgccaacacatgaaaacaagtcaatgattaagatcacataaacccatgtcatatgtatattcaatccagaattgttttagggtcattgtagccatagagttttcaaataaattatttgaatataaaagtagattatgtatttcccctgtggctggccaaatgtcttttcaacaaagggtaaaataagaaggctattttttgtgtaaaagagtgatctttttagtcatgcttggctgccttttcaggactgtctccatttataatgagatattcttgaactcatttgaaccagaaagtttagtaaatttgtggtacatttttacataaaatatcataatttgttttaaaggatcaggtctagagcaaagagaaagtatatgaatgattgttttgatttttagactataattttgagctgacatctacattggacaatgtctggaatattgaaaaaatatatttatttggttactatttcatacttcttggcagttctaatttcatcttattgtctacttaaaagtgtgcttgctattcaaatctcagttgaagctgtcataaagactatcattacaatagtttctatagttttcagagttcttggcattgaaaggtgatgatggcccttccagaataataagaaaaagtattttatataaattttatggctctgctttgaagtaaatttgacttatatgcaaatttgctaatattaacttttttcttttcctattaacatagttagtaaaaaaaataatcctaaggctggaaatgcacgggcatatgcttacacacatgtagtggtgaaagaaatctttttgaaaactgaaagtaaattttgacgtgatcattaacatataaaaacatgtttgtgttattctctagtgttttaacattctctacacttaactatttttctaatatacctgaagatcttttttaaaaaattttagttatattttttgcagttacaagcagaaaaatcagttaatagatttttaatctgatatcaaaaatcaactccatatagtacttatttccaatcttatttctctaattgtactttgaaatggatacattatttgttttacatttgtacttcccttgaacctcctattttcttttaactactctacaacaaatgccatttttttttctattcttttccctttatctgatttttacagcaaatgatgtgtcatgtctctcctgaaattgaccattcttttcagaaaagattttttcttttttggcctatggtgctacactgaaaaagtcacccagctaaaatgagttacttcatttccaaataaaaacaatagtgttttcatgcctgcacttattattattctgagaatgtactaatttgttacatccaagatgacggttcgttgggtccgtgaaaagggcagtgtgccaactacagcagggaagtaaaaggacttctttcatgggaagtagtgggacagaaagtagcccgcagttcttgtgggcatcaggaggcacgctgccaatggagtcatcccagtatcaagatttcctgtgttgggttctgaatcaagctaaaactatgatttcactaatgtcggcctgggcggtcaaattttcaaactcgctattacgctaaggaacaactgatagatgttttatccccataggcactggctgatgcgaaacaaggattttgaatgtgtacagtgcattattacttttggtattaagcttaaataattgtctacttaccctgagctggtaatagcaaaatacaagcaaaggaggacatttttacaaagtaaaactgcaaaacagatttatctatattactatggattttttttattgttgttcttctcccctattaaatttgaatgataatgaagtttgattctatacttttattcggctctaaaccagggtggtctcataattttgttttacatgcatgacattgcttaaggtcattagttgtaaatcgtagtacaaaaaggctgaaaatatattcagcactttgtagtttccgaatacacatttaagagctgctatgaaaagtcgagacctacatggcagattttctggcactgaatggtcaatttagtgatgtagattagtgaatccaaacagtaagtggagagagactataataatgctttgatatgtccctctgttgaagcatatcctggttgatccattttctgttattgtaatatttttctttgctctatggcaaaatgctctctactttcttattttttaagaatataacccagaaaaagttatccatttttaaaaataactttcatctgctcttggtaccacttaataaatgaaaaaaaaaagcagatttggattatgaattgagttttattttgttggaataaaaaactttcctttgataacatttgctttttgttcaatatgtatttgccgagtttttcttttatcataaagttttaattcatggtcccttttattttgaaggggagtgtactttaagcaacatttatacagcaaccattttaataatgatgataatgttattttatcgaaatcttgaaataggttttaatcaaagtttgactgaccttgacttgatattttgagtcctttttcatttttgtgactaggaagtaaaaacaagttctgccttttatattcttcatgagttatgaatttaattttcttgacatcttacttcaaaatcaagggcaatatgtatttttctttttaattccaaatggaaactggctgaattcacaataaagacaactgaaaattggaattgtttaaaaattaaaaaaaaaaatacaccgttgtagcagattttaaatgaagtaggttatcaagtggactgctaatttttgcctttccaaaatgttggatatttaaccctcagaataattaaatatttgtaataaagcagttaattcaagcagtttattgctgtaatttgcaaaagtacattgagctgctttcttttcagctcattgatggaggaacaaacatttctttaataagactacagcacattctaattttgttgcaaaagcttagataaggatcaggccccctctgaatcactgcattgacctatgacattgaaagtgctgaagctctttggcaaaagaagagttagacattcattattatgcacaggactttccagttctaaaggggctctgtgctttctctcagatagactttgtttgttggaaatgagaactgtattttggcagcaaaggaccagaactgaagctactctgcaggcagaatcattatgacataatccttcattaatcctcattctctattaatagatcatgcagaagttttcctttagttgatcatcttcatcaaggagctatggaaaagcattaccagtgaaatgcccacctctggttttaagactgtttgtttatatccatctttattagttgcaaagattaatggtgaaaataatctcttagactttgcttggtatacaaaccacatatgaggacctaaaaaatctgatataactgaattttcatgttttgggggtaaaactcacctggaaataaaacatagcacttaacaataaaaaagaaaaaattatcaggctaaaatttgtttctggtgagataaaggggttctagtcacagaagcacgggaatagtagctaagcagcccaacttcccatattgcttaagaaaacaagttatcatacaaaatatgtatttttctaactgttacttaacagattgaattactcttgagatgctcaacttttcatggtgggtggtgagggtgcatctcctttagaaggatacatatgtacttgtttttgtccaaattatctgcccagatcagacactggagctgcgaccttccaatgtaagattttcatcatatccttttaagaatttggggactcatgtaaaatgtatttagagaaaataaataaatatcacttgctgttttcatatacacccttggggtcttgataagccaaagttctcacagaaggtctggttcatcagttcagcctcaccatgagccccatggcctgctgctgtccctgacactgacactaggcaccacgtctttgactcatctttgttgatagacccaaaacttcatttgaaggcatagtttaggaatattaggaggagatttttatgatatttattttacatttagtcgacagaatttaaatattttaaaataaaaactatctatagggagatgattcgattaagcagtatgtaccgttcctagaggagtatgctgaaaaagctttctctaggttttgcaggtgattgttccggtagaggtgtgctcatagtgtttagtcattaatggagactgtgcctccgttggaactggctaataggtccagattgatccctcatagtaatgtcactaatacttgtaatactagaaaatatgcatgctaccaaaaaattgtaggaacatatttttatgttgtctggcacatatttctgaattaaaaactcacagaaggtaagaagttgtccatagacacacaaattgtaattgtttaatttggcttttaatctaagccttcccatcttttaatgattttatgtataatctgcagtaaagagaactaggatttattgaacaactgttataaatagaccacctccctaggtctaattaatttcaaggctaatagtctaagctaattgaaagagagtcaccatagaactgtaaggtaaaagctgtactttctaggcctttgatgttcaggttgaattggaatctgggtttgaaaatttctacaagctaaaccagagatggtcaggggacactccaggcaaggcctaaaaaatcaaaatgtgaccagtgttttaatgcagtggctctccttttgtttatcagaattgctggtggtggctggtaaggcaacatagacaatgcataatattcagccctcaaaaggacattttcataatactaaatgtttatactcaagaatctaccagaaaagtacttgaaagttaccgtagtcaagccaagacctgcaaacctggaaagccagtcaatatcaccatagtgggcagcttttccaaaatgtttgcccagatcttaatttatttgctttaacctgagatttttgttgacagtaataatatttgacaattagtttgtatttaagaagattttacacaacaaaaagtatggttgcatatgaagaaaataggattaagaaatgtatttcaaatttaataaaaatgtggatcatggcaatttgatattggcttttcttgatgagttttccggtgtgtggattttgaagtgggcacaatgctccctatcagatcatttcaaattgctcctggacagaattcctcctcctcctctgtattatttttttcactgctgctgtagtaactcgccacaaacttactggcttaaaacaacacaaattcattattttacagttctagaagtcagatgtctaaaatgagatggtaaggccgtgttccctcttgggggctttaaggaagatctattttcttgagctttccatcttccagaggccacataaatccttttgcttgtgacccgttcccccatctccaaagctagcaggcagcatagcatcttcgaatgtctttctctatctctcagcttctattgtcactcagcctctgtctcacactgacttctcctgcattgctctcataaggaccccggtcattacctcaggccaaccaggcaatccaggataaactccccatctcaagacctttaacctgattacttctgcagaaccccaaggtaatattcacaagttttgcgtattagggtgtggacatctttgatggtcattactatcacatcccctgaccctctggggaagaataggggactgtttttcatttccttgggcatcaaacagtgctgagatctgtggttccacacctctgctgggatgctttttaaaatccttatgcccagggtatacctcagacctattatatcaaatttctcggggtgcgtcacaaggcatcaagtatttttaaagctccccagatgattttaatgtgcaatcaaggtggataacaacttatttaggagcctctttttctctctaaagactctcctgggatttggctaggatatatgaaagcatttaaattttatcaaactgaattcagattttgttgagagacaggcacaaatttctaggagaatttatattttaatggctcaatatttgttagtttagaccagctttaaagttttatactcaaaaggacaggataaagaaaacttattctgtaagtatctagttcaagtactattggtttaaattactttaatctatagatgaatcttgtattctttaaatgtgtaaattaaaaagcactttttagaatttttcctgtaatagtgtgaattcaactcaacatctcacatgctgtttcagctgtaaatcaatgatactgaatgtaagctaatattctgggcttgaaattggcttaatagtgagttacgtggactggaatatagaataattcctacctaatgtgtcatcacttaaagtttacttctccacatagccagaagaatctaatgatttaggagggcttattttggttgaaatttgagtgttcaatttatataaagtcactgattggtcaagacctttagccacagcatgcagaatcttgactcttctaatatatacattacgaaataatgtatatattcttaattactccagataattactctttaaaaaggagagagacaaagaaagttgagattatttttactccatggactgaatgtttgcattgttcatacgtttttacaggttatttttaagattggagaagaagatcatttgtatactggtctctattgaggataagagtttgggagacagttacaatgtaaaatgaacatgagccataaaatagtcacttggtgtttatgttttgatgatacaaagacaacaaggaatatagtggctgcatttttcagatgaggacaaaaagtctaaggaacaatgtttgccctacttctacactgatgagaaatgtagaaaatattgcatacatattacattactggattgcatagaacattttcacagcttatgagggcaacaaataaagcctatgaaatcaaaactgccttctagaatactccaaaagtaagcttgagtccaagtcatttgttagattcttgttcttacttttcataatggaaaatatttattgataataaataccaatataagaaataaataaaattatgtgataccaaatttctcaactctgttgtgtatcaggaccaaggaacatgttcattagaatttttgacaaacactaaaatcactttaaaaaatcccacacgtggaagctgttaaattaatacatatgtaataactaatagctacaagtaggcacttcaaattacttcatttaattacacctcacaacagctattcaatataaataaaaataatactccactttacagatgaaaagcctgagaactagaaagatttagtaactctatcaaaatcatacaactaataagtggcagaaccaggagacacatccaaatgtgattcttaactactccagggcacttcagttcaagctagtgcaggttttaactaacttgtgctttggattcacatgatcccagatcagagtagagaacaagcataggccaaatctttgtggccagtttgttttgcaggacataggagaatagaatgagagatactcctccaaaaaaaaaaaaaaaaggtgttcaagaagtttaatttttcatttgaatttatatcaagtactcatttaaaccattctcaagattatattgattcctctttgtgtgcgtcccactttgaaaattctcatcatttggaggtaaatttattccattttattattatcctatagaggaaatatctaaattttattattatagatcactgtttctcagcctgttcttctaattgcaaagataagaattccttccttgtaaaaaacatttttcctggatctcactttagaatgcctgaatcaaactctttggggtcatggcctggggaatctggcttttcttttgcaaactcaccaggttatttgtggtagaaatgaatttcatttgctcaaaatctagattttgaaatcaatgctcattacgatgatttagacagacaatgcaaagcatcagagaggtagaaaaatggtgaggatatactccatattctagtctcctctatccccatttcttgctaactccctcctgcccctttctccattcatcaaacatgagatgaagtttccacagtgtgcagtcactgggctggcctgagatattgccaaatagttcaggagagtgcatacttcatccctgcttttgaatactaaagaaggcctgctgtaaaaaaaaaaaagtgtttgttattgttatattcagtgttttccaaaatatttacccacagaaccctttctttaaagaatacgtgctactccggaaagcactgttagaaaaagtggacatgacaatgacattatttacatatcaaaatgcaatcaatagctggtggaattcactggtgatgcattcattgcctttttaaaaccactgttgcttaagctagctcctggaagacctcacgcgtattagaggcaatccaggtatttgtgataccagcccttatgtagccaaaaaggattcttacttcaaagtttctacttctctttagaaaggcgtaaattcaactgattcaattattctgttataaatttaggcaaataactcagtatcttcatcttggtctctgtctcattgctatttttcaccttgcctttatttgttgcttaattattaaagcataatgtgtacttaaaacgcacacagctcaaacaaaaccatacaaagtatacagtggaaaccaaaattacacctcattcctacaatatcagttctattcttcagaagtatttttgcatttttcccatattttcccccatattttgtgtgcagtttttttatttttaaattttaaaatattttaaacgtctggggaaataaatatgtataatgtgtaatatatgtcatacatgatatgactgtatatttttacaaagatgccatcatatactagtctaaaattcacttttgtctattcaatatattgccttaggcttccgaagttccctggaaataaggattttatgttcctaatgcacctcacaatttttaaagtgcattgccatgaactgtgtaataacagtacctggacctagtcttaaaacaagttctttcccaaatatctgggtaccacttggttagttaataatgtcttagcacattattatatgagaatgttttctcatgtaatagttataagtgtgtcacacgatttttacaaacagcttctatagaaacacattttttgcaaatcactcagtaaatatactacaagatattattatttaaaggaaaactggtatgaattttattttacactaagaagcctattgaaaaaataaataattgctctctaattcatgagtttaagttatccaaatttttataaatcaatatgtggactttgtggagaatttacgaccacccaaatatgataacagaattttactcttcaaggtttacattcttttcatttgcaaagtcatgatcaacaaggtaagtaaagctaaataattaaataaaaaataatgttccttgcgtagtactatctctttccctttttttttcccacttggtaagatagcaaatggagaatatttttagcttatttatactgaactgttatttggcaaaattaacatttaaaataaaatattcatttcaaaggattagctatcattacatttaaaaactggatttgcagagagcagactggtggttgccaggggctgaggaagtaagagaagtaaagagatgttggccaaagggcacaaactttctctcagtagataaacaggtcctggggatctaataatgtacagcacgactagcaataaatgttaactaaattggttgtggtaatctttacataatgtacacatataccaaattatcacagtgtacaacctgaatatatcccattttgtttgtctattaaacattttaaattttaaaaaatataaaaaataaaatgtattacagtattttgtaaaataaagtgaatcgtgcatttgataaaaatactcaggtagtaaagaaaggctaaaagtaaaatctctttcttccaatccctcctcccaacaaagagtgccactccccagagataactatggttagtagtatcttgtatttatcctttccaataaaaatgtctatcatatatatatatatacacacacacacacacacacacacacacacacatatacatatactttttattttttattgattccagggtacctgtgcaggtttgttatataggtaaattgcatctcatggaggtttggtgtacagattatttcatcaaccatataataaacatagtacctgataggtagtttttgctcctctccttcctcccaacatccaccctcaattaggtctcggtgtctgctgctccttcctttgttccttatatattcaatgtttagctcccacttataggtgagaacatgcggtatttggttttctgttcctgcattagttcacttacgatgtggcctctagctccatccatgttgctgcaaaggacacgatctcgtacttatagcctttttattagttcctaaacaggatcataccacatgcactgtcctgaaccttgcctttttttacttaataccttgttcgaacttttatcttattagcatttacagatttacttcatttaaaaaaaaaaaaaacacttgacatccctctttgacttcactgtaatttatttaacctagcccctcttctgggacacttgggctgtttctctcttctggctattaaaaacaatgctgcaatgaacatccttatgcatttattttagcatgttgtttgaagaataccaatggcacaaatttctagcagtgatagtattacttgcatagattaagatgatcaatagtactcaagaatcaaaagcatgtcaagaagcaagaactctctaacacgggtagtgtaagtggaaattggtgcaaacttctggaagggcaatttgattatgccttaacaaaatttgaaattcatatataatttcaaccagaaatttcagtgtcagaaattgacctgatcaatacataagattatttcttatgaattaccctcctacattacatctatgcagctgtaaagttaagagtattagagctggaatggaatgtagaaattatctattccaatttctgaggcccaaggaggttaagttacacagtgaacaggtgcccaacagagaaattctgcactagctgctagatacttcaaagggatagacaattagacacatcctttttctctcaggcctccatctcattggtcatagttactatattgctatctctcttccttgctgtgtctgtccttgtgttgttttgttagatttttatcaaaggtgtggttctgtaggtttcatgtcccaggaaaacgtttcaccagaggacaggtccattcagtatgattgagggctggggagaataaaagagtaaccagggtgttaagccttaagaaagtgagttagtggtctggtatctgtcctttataggttgctaaattaaaaaccattttttgaaaatacgcacaacacttctgacaccaaatatgtgggtttttccttcacattaagcaattatccaactcttgggacaccaactgggtgtcctacaattcagttctgactttatctggagtgagagtagatcccacaggttaagagctaagtcctatgagactgcccaccacttcagacaccaaacacaagtcccaagttgtcacctgtactctgaccaaccaactataaattgttccttcccaaactccttgataatttgctataagagctcataaaactcagggaacatttacttctgattaccagttcattacaaaggctattatgaaggatgcagatgaacagccagctgaagaggtgcatagggtgagatccaaagtgttctgagcacggcagcttctgtccccgtgaagttggggtgaaccacactcctggcacatggatgtgttcagcaacacagaagctctccaaaccctgtcattgagggaggcttcatcacagaggcatggttgaatattcactcactctccattccctcacaccttctgggaggataagggcagggctgaaagttccaaacttctaatcatggctcagtctttctggtgaccagcctccattctggatctattcagaaaattaaaacaaaagatgctcttattacctaggaaattccaagggatttaggagctctgtgtcaagaattgggatcaaaaaacaaatgttagatgaaaagaagctcctagcacccctgtcactaggaaaatacaagggttctaggagctctgtgccaggagccaggggaagagaccaaatatgtatttcttattatgtcacagatgggaattcaaaacaaataggggtcaagggtggtatccttagtgaccaggacaggtcctgatccgtagtgaccttcgttactccaaaaaggaaaagcatctgccagttttgtaaaacacataatgagtcacagatttccacagctagcatcaattgactggtcaataactttatgtccatgtattttaagacttaaaatcttaatacttgttatatatggcagagtgtaagctggacatcaacaggcaattcacatacaaaaaaggagttactaacagaaaatgatagaatattagaataaaataattagaaaaaaatgacaatcttgaagcatcattttttctgtccaagttatcaaagtttatcttttcacagtaatatttcaggttattgagatttttttgtttaatgggtgcttatttgggtagacgggggaaactttgagagcaccgttgactgcacagacttaaaaactgaaacattttggcccaataattttgctactagaaatttagcctagaaacatcattcagaaaaagaaagttgctataaacactgggatgttcccaacaacctaattttttgactagaaaaattggaagatgcctaaagtccaataaatgaagagtggtgagtaaaattgtagtaggtcaaacagatgaaacattaaatagatgatgattatcaaagccatgtaacttagtaagcaaatattgtcatacatttataaaatcaagatgtgaaattgtgcatacactagtattgataaacttaatggatggctgtgtatgaataagttccagaaaggaatatataagtacatacacacacacaaagtagactttgtattataatttttgtaatattttatttgaccaacaataacaaaattaagcaataaaaataacaaaacaaaaagacatatgaatatttttacttttcataggttttctcctgttgcttctgtacatattcttggttagttccacctagaatgtgaaaaagaggagaactgttttgctcaatacatacagttttagggagacagtctcagaatttgagtacaaccccagtgcactatcttaattcattctggaatgagagaaatctaatgatgtaacaatagaatcaaatcaagtaagactttaaaaatggttacttttttaaaatgcaggaagatgtacaatttcaagtttcaacatttccaatgacaggaaagtcactaccccacaaagcagcatactcaatttataaatagctattcattcattctacatgtattgagccgattttctgtttagaataatcgaatcgaaagcaacaagacggaaagcaggaagatcagttaggagactctctatttagtataggtgaaagataatgaggcccaaactaagtcagcaccaggagagaaaatgaaagaacaaatttaaaatatatttggaaaacagctcaattagacttaatgactacctccagacgaggtctaagggaagagtattagatttcccctctcagtaagagtagaaaataatctctggccatctttactctgccataccctccttccatcttccataaatttgttttaaaatctgagcttatcagagagcccagacttctatattgtttcttctcctaatttttaaaattgatttttatttttatatatttagggggtacgagtgcatatttcttacattcttatactgtgtagttgtggaacctgggtttttcgcgtacccatcacccacatagtgaacactgaacccaagaggtgatttctcaacccttgctcccacaccactatcccatgttttgtagtctctagtgtttattattacactctgaatgtccatgtgtacccattgtttagcttccacttattgtttattggaaataaaatacacgttcaaatgtatttgcaaatacatgttcaaatacagcatgtttttgactgtatatttctgtatttgactttctgtttctgagttattccatttgggataatggcccctagttccatccatgttgctgcaaaagatatgattccattccttttcatggctgcatagtattccatatatagatagagatatatagatatatcacattttcattatccagtcctctattgatagaaatttaggttgattccacatctttgctattgtgaacagtgctgtgataaacatgcaagtacaggtatcttttccatataatgatttcattccctttgagtatatacccagtagtggaattactggattgaatcgtagttctttttctagttttttgtcttctcctaatttttaactgctgacttattttattgagacacaatttttttacttgtaagggtcctctttccgtttttttttcttcagcttttaagttctgaggtacatgtgccagatgtgcaggattgttacataggtaaacatgtgccttggtggtttgttgctcagattatcccatcacctacatattaagcccagcatctgttagctattctttctggtgctcttcatcccccgactcccactccgacatgcctcagtgtactttgttcccctcaatgcgtccatgtgttctcatcattcagctcccacgtataactgagaacatgcagtgtttggttttctgttcctgtgttagtctactgaggataatggcttccagctccatccatgttcctgcaaagaacatgatcttattcctttttatggctgcatagtgttccatgttgtatatgtaccacatttttctttatccagtctatcattactggacatttaggttaattccatgtctttgctattgtgaatagtgctgcagtgaacatatgcatgcatgtatctttataatagaatgatttacattcctttgggtgtatacctagtaatagggttgcagggtcaaatggtatttctgcctctaggtctttgaggaatcaccacactgtcttccacaatggttgaactaatttacactcccactaacagtgtaaaagtgttactttttctccacaacctcaccagcatcttttttttttttgacttcttagtaatagccattctgactgacgtgagatggtatctcattgtggttttgatttgcatttctcaaatggtcagtgatgctgagctttttttcatgtttcttggctgcatacatgtcttcctttgagaagtgtctattcatgcctagattttcttctagggattttataattctgggttttacactttaaatctttatttatggatttaagtctttaatccatcttgagttaatttctgtatatggtgtaaggaaatagtccagtttcagttttctgcatatggctagccagttctcccagcaccaatttttaaatggagaatcttttccccattgcttgtttttgtcaagtttgtcaaagctcagatggttgtaggtgtgtactcttatttttgagttctctattctgttccattgttgcatgtgtctgttcttgtaccagtaccatgctgttttggttactgtagccttgtagtatagtttgaagtcgggtagcatgatgccaccagctttgttcttttcacttaggattgtcttggttatttgggctctttttaggttccatatgaattttaaaataattttttctaattctgtgaagtatgtcaatggtagtttaatgggaatagcattgactctataaattactttgggcaatatggccgttttcacaatattgatttttcctattcatgagtatggaatattgttccatttgtttatgtcctctctgattcctttgaatagtggtttgtagttcttcttgaagaggtcattcatgtcccttgttaactgtattcctaggtattttattctttttgtagcaattgtgaatgggagttcattcatgatttggctctctgcttgccttttgttggtgtataggaatgctagagatgtttgcacattgattttgtatcctgagagtttgctgaagttgtttatcagcttaagaagctttggggctgagacaatagggttttctagatataggatcatgtcatctgcaaacaaagataatttgacttcctctctttctatttgagtatcctctatttgagtatctcttgcctgattgccctggccagagcttccaatatatattgaataggagtggtgagagagggtatccttgtcttgtactggttttcaaggggaatgcttccagcttttgcttattcagtatggcattggctatgggtttgtcatagatggctctcattgttttgaggtatgttccttcaatacctagtttattgagagtttttaacgtaaagggatgttgaatgttactgaaggtcttttctgcatctattgagataatcatatggtttttgtctttagttctgtttatgtgatgaatcacatttattgaattatgttttcttaaaattttactttaatttctgggatacatgtgcagaatgtgcaggtttgtgacataggtatacatgtcccatggtggtttgctgcacctaccaacccatcatctaggtcttaagtcctgcatgcatcaggtatttgttctaatattctccctccccttacccccactccctgacaggccctggtgtgtgatgttcccctccctatgtccatgtgttcttattgttcaactcccacttatgagtgagaacaggcagtatttggttttctgttcctgtgttagtttgctgagaatgatggcttccagcttcatccatgtccctgcaaaggacatgaactcattcttttttatggctgcatagtattccatggtgtatatgtgccacattttctttatccagtctatcattgacgggtattttggttggtcccaagtctttgctattgtaaatagtgttgcagtaaacatatgtggcatgtgtctttatagtagaatgatttataatcctttgggtatatacccagtaacgggattgctgggtcaaatggtatttctggttctagatccttaaggaatcacccacactgtcttccacaatggttgaactaatttacactcccaccaacagtgtaaaagcattcctctttctccgcagcctcgccagcatctgttgtttcctgactttttaataatcaccattctaactggtgtgagacggtatctcactctggatttgattgatttgtgcatattgaatcaaccttgcatcctgtggatgaagtcaatttaattgtggttgataagctttttgatgtgctgctggattcagtttgccagtattttattgagcattttggcattgttgttcatcaaggatattgacctgaagttttctttttttcttgtacctctgccaggttttggtatcaggacaatgctggactcatagaatgagttagggaggagtccctcctttttatttttttggaatagtttcagtagcagtggtactaactcttctttgtacctctgttagaattcagctgtgaatccatctggtcctgggctttttttggttggtaggcaatttattactgcctcaactttggaacttagtattggtctattgagggattcagtttcttcctggtttagtctcgggagggtatatgtttccaggaatttatccatttcttctgtattttctagtttatgtgcacagaggtgcttatagcattctatgatggttgtttgtatttctatcaagtcagtggtgatatctcccttatttctgactatgtttgatttttttttactttattagtctagctagtggtctattttattaatttttttcaaaaaaaaacagcttctagattcattgatttttttgaagagtttttcatgtctctatctacttcagttcagctctgatcttggttatttcttatcttctgttagctttgagatttgtttgctcttgcttctctagttcttttagttgagatgttaggttgttatcttgagatctttctagctttttgatgtgggcagttagtggtacaaatttccctcttaacactgctttagctgtgtctcagagattctgatacattgtgtctttgttctcattagtttcaaagaagttcttgatttctgccttaatttcattatttacccaagagtcatttatttaggaacaggttgttcaatttccaggtaattgtgtggttttgagtgaatttcttaatcttgaattccaatttgattgcactgtggtctgagagactgtttgttatgatttccgttcttttgcatttgctgaggagagttttacttctgactatgtgatcaattttagagtgaatgttgtgtggcaatgagatgaatgtatattctgttgttttggggtggagagttctgtagatgtctatcaggtccatttgattcagagctgagttcaggtcctgaatatatttgttgagtttctgtctccatgatctgtctaatattgacagtgggtgttgtagtctcccactattattgtatgggagtctaagtctatttataagtctctgagaacttagtttaagaatctgggtgctcctatattaggtgcatatatatttaggatcattagctcttcttgttgaattgaaccctttaccattatgtgacatccttctttgtcttttttgatctatgttggtttacagtctgtcttgtcagaaactaggattgcaacctctgctttttttctgttttccatttgcttggtaaaatttcctccatccctttattttgagcctatatgtgtctttgcatgtgagatgggtctcttgaagacagcataccaacgagtcttggctctttatccagcttgccattctgtgccttttaattgggacatttagcacatttacatttaaggtttgtattgttgtgtgttaatttatttgatcctgtcatcatgatactagcaggttattatgcagatttgtttatgtggttgcttcataatgtcactggtctgtgtacttcagggtgttttagtagtggctggtaatgatttttactttccctatttagtgtttccttcaggaggtcttgcaaggcaggcctggtggtgactaattcccccagcatttgcttgtctgcaaagcatcttatttttccttcacttatgaagcttagtttggccagatatgaatttctgggttggtattcttttctttaataatgttgaatattggcccccaatctctcctggcttgtaaggtttccactgagaggtccactgttagtctgatgtgctcccttttttaggtgacctggtctttctctctggctgtgcttaacattttttctttcattttgacctttgagaatctcatgatatgtgtcttggggttgatcttcttgtggagtttcttacttaccccattctctgaatttgcatttcctgaatttgaatggtggtttatcttgctagttaggaaagttctcctggatgatatcctgaagtatgttttccaacttggttccattctccctgtctttttcttgtaccccaatcagtcatgggttcatgacatgggttcatacataatcccatatttcttggaggttctgtttattccttttcattcttttttctctattcccttctggctatcttatttcagaaaatctttaagctctgagattctttcctccacttggtctattctgctattcatgcttgtgattgcattgtgatgttcttatgttgtgtttttcagcactatcaggtcagttatgttactctctaaactggctattctggctatcagctcctgtattgttttatcatgattcttagcttctttgcattgcattacaacatgcttctttagctcagtgaagttcattattacccaccttctgaagcctacttctgtaaattcagccatctcagccttaacccaattttgtgccgttgctggagaggtgttgtggtcatttggaggagaagaggcactctggctttttgagttttcagtgtttttgcattgattctttctcagctttatgggtttatctaccttcagtccttgaggttgctgaccttcgaatggggtgtttgtggggtctttgttatcattcttgttttccgcttgcctgtttttattttaacagtgaggccactctttcatagggctgctatggtttgctaggggtccgctccagactctagttgcctcagtttttcctgtacctggaggtttcaccagtaaagcctgcaaaatagcaaagatggcagcctgctccttcctctggaagctccattccaagggggcactgacctgttgccagcctgaacacacctgtaggaggtggctggagacccctgatgggaagtctcacccagtcaggaggaacgggatcagggactcatgcaaataagcagtctggctgcctttttgtagaggagatgtgctgcattgcagggttggtggggggtcttccttgtccagatagtttgtattctccaaaaccagcaggctggaatggctgagttgaccaaaccacagagatagtgggcatcccttcccctgggagctttgacccagggaaagatcagagctctgcctttagaaccttgctggagtggctgaagctcccacagggaagtcttgcccagtaaggaggaatggattggtgtaccacttaaagaagcagtctggccatgatctggcaaggcagctgtgctgcactgtgagggacccctctctgtccagactccctgtagtcttcaaagccaacaggctgaaacaactgagtctactgaatcacagagatggtggctacttctcaccccaggaacttggtcctgactcaggcagaccctgctgccaccagccagctggaattccaagtcagtgggtctcaacccacgaggtgctgtagaagtgggatcctcagaatgacactgtttgtgtccctagactcagcccccttcctagggacatgcattgatggttcttctgccttgctgctgatcccagggccagagtatgcaaaattcctgggtctctgtgtgtgcctgagtggctgctctgccaagactccacacagctctgtgtgacagacccaaggccctggtggcatgggctcatgagggagatctcctgatctatgggttgtaaagatctgtgagagaagtgtggttcccaagtcaggttgcacaaacactcaccacttcctttggctggggtggaggttcccttgactccacgctcctcctgagtgggctgtcacccaaccctgctactcttcactctctgtgggtcaagctgtttgcctcatcagtcccagtgaaagaacccggatatctcagttgaaggtggtaaattcacttgctcctttcattcctctccatgggtgccacggacctcagctgcttccagtcagccgtcttgggccctctctgggattctctttctttttaaaatcaatcttctttactaagacttatgtctacagaataatctgaattttgtattttaacttttaaaaatccacttttctgaattctaaacatgcgtctcaaatattaagatacacacaaatcaccaggtgatcttgttgagacacagattatgattctgtaggtctgggttggacctgaagaaagtctgcttttctaacaagctcccaggttatgcaatgctgttagtcctcagaccacattttattttttactctttttaaattatacttaaagttctgggatacatgtgcagaacatgcaagattattatacaggtatgcacgtgccatggtggtttgctgcacccatcaacccatcatctacattaggtacttatcttatactgtccctagccccatagcccccaacaggccccagtgtgtgatgttcccctccctgggtccatgtgttctcattgttcaactcccacatgtaagtgagaacatgaggtgtttggtttgctgttcctgtgttagtttgctgagaatgatggctttcagcttcatccatgtctctgcaaaggaaatgaactcatccttttttatggctgcatagtattccatggtgtatatgtgccacattttctttatccagtctgttcttgatggacatttgggtttgttccaagtctttgctattgtgaacagtgctgcaataaacctatatatgcatgtgtctttatagtagaatgatctataatcctttgggtatgtacccagtaatgggattgctgggtcaaatggtttttctggttctagatccttgaggaattgccacactgtctttcacaatggttgaactaatttacactcctaccaacagtgtaaaagtcttcctgtttctccacatcctctccagcatctgttgtttcctgactttttaatgattgccattctaactggtgtgagatggtatctcattgtgggtttgatttgcatttctctaatgaccagtgaagatgagctttttttcatatgtttgttggccacatgtttgttgtttcttttgagaagtgtctgttcataaccttcaccaatttttgatgaggttgtttgttcttttcttgtaaacttaatgaaataaagcatgaagacaagattagaggaaaaagaatgaaaaggaacaaacaaagcgtccaagaaatatgggactatgtgacaagaacaaacttacgtttgattggtgtgctgaaaatgacagggagaatgaaaccaagttggaaaacactcttcaggatattatccaggagaacttctccaacctagcaagacagaccaacgttcaaattcaggaaatacagagaacccccaaagatatttctcgagaagagcaacccgaagacacataattgtcagattcaccaaggttgaaatgaaggaaaaaatgctaagggcagccagagagaaaggtcaggttactcacaaaaggaagcccatcagactaacagcagatctctctgcagaaaccctacaacctagaagagagtggggaccaatattcaacattctcaaagaaaagaattttcaatccagaatttcatatccagccaaactaagcttcataagcaaaggagaaataaaatcctttacagacaagcaaatcctgggagattttgtcaccaccaggcctgccttacaagacatcctgaaggaagcactaaatatggaaaagaaaaactggtgccagccactgcaaaaaataccaaattgtagagaccattgacactatgaagaaaccgtgtcaactaatgggcaaaataaccagctagtatcataatgacaggatcagattcacacataacaatattaaccttatatctaaatgggctaaatcccccaattaaaagacgcagactggcaaattggttaaagagtcaagactcattggtgtgccgtattcaggagacccatctcacgtgcaaagacacacataggctcagagtaaagggatacaggaaaatttaccaagcaaatgaaaagcaaaaaaaaagcaggggttgcaatcctagtctctgacaaaacagactttaacccaacaaagatctaaaaagacaaagaagggcattacataatggtaaagggatcaatccaacaagaagagctaactaccctaaatatatatgcacccagcacccaggttcataaagcaagtacttagagacctacaaagagacttagactcccacacaataatagtgggagactttaacaccccactgtcaatattagacagatcaatgaggcagaaaattaacaaggatatttaggacttgaactcagctctggaccaagtggacctaatagacatatacagaactctccaccccaagtcaacagaatacacattcttctcagcaccacatcacacttattctaaaattgaccacataattggaagtaaaacactcctcagcaaatgcaaaagaatggaaatcataacaaatagtctctcacaccacagtgcaatcaaattacaactcaggattaagaaactcactcaaaatcatactactacatggaaactgagcaacctgctcctgaatgactactgggtaaataacaaaattaaggcagaaataaataagttctttgaaaccaatgagaacaaagacacaacatacaagaatctctgggacacagctaatgcactgtttagagggaaacttatagcactaaatgcccacaggagaaagcgggaaagatctaaaatcaacatcctaatgtcacgatttaaagaactagagaagcaacagcaaacaaatacaaaagctagcagaagacaagaagtaactaagatcagggcagaactgaaagagagagacacgagaagcccttcaaaaaaaaaattaatgaatccaggagcttgttttttgaaaagattaataaaatacataacctgctagccagattaataaagaagaaaagagagaagaatcaagtagacacaataaaaaatgataaaggagatatcaccactgatcccacaaaaaaaaacttctatcagagtatactataaacacctctatgcgaatacactaaaaaatcgagaagaaatgaatacattcctggacacatacaccctcccaagactaaaccaggaagaagttgaatccctgaatagaacaataacaagttctgaaattgaggcagtaattgaggcctaccaaccaaaaaaaaagcccaggaccagacagattcacagccaaattctaccataggtacaaagaggacctagtaccattctttctgaaactattccaaacaatagaaaaagaaggaatcctccctaactcattttatgaggccaccatcatcctgataccaaaacctggcagaggcacaacaaaaaaagaaaatttcaggccaatatccctgaagaacatcaacacaaaaatcctcaataaaatactggcaaactgaatccagcagcacatcaaaaagtttatccaccatgatcaagtcggcttcatccctgggatgcaaggctggttcaatatatgcaaatcaataaacataatccatcacataaacagaaccaatgacaaaaaccacatgattatctcaatagatgcagaaaaggcctttgataaaattcaacaccccttcatgctaaaaactctcaataaactagatattgatggaatgtatctcaaaataatatttgtttataacaaacccacagccaatatcatactgatgggcaaaagctagaagcattccctttgaaaaccagcacaagacaaggatgccctctctcaccattcctattcaacatagtattggaagttctggccagggcaatcaggcaagagaaagaaataaagggtattcaaataggaagagaggaagtcaaatggtctctgtttgcagatgacatgattgtatatttagaaagccccatcgtctcagcccaaaatccccttaagctaataagcaacttcagcaaagtctcagaatagaaaatcaatgtgcaaaaattacaagcattcctatacagcaataatagacaaagagagagccaaatcatgagtgaacttccataagagaacaaaacacctaggaatctaatttacaagggatgtgaaggtcttcttcaagaagaactacaaaccactgctcaagtaagtaaaagaggacacaaataactgcaaaaacattccatgctcacaggtaagaatcaatattgtgaaaatggccatatttcccaaagtaatttatagattcagtgccattcccatcaaattaccattgactttcttcacagaattagaaaaaaactactttaaatttcatatggaaccaaaaaagagcccgtataaccaagacaatactaagcaaaaagaacaaagctggaggcatcacactacttgacttcaaactacactataaggctacagtatccgaaacagcatgataatggtaccaaagcagatatatcgaccaatggaacagaacagaggcctcagaaataatgccacacatctacaaccatctgatctttgacaaacctgacaaaagcaagcaatggggaaaggattccctatttaataaatggtgtttggaaaactggctagccatatgcagaaaactgaaactggaccccttccttacatcttatacacaaattaactcaagatggtttaaagacttaaacataagacctaaaaccataaaaaccctagaagaaaatctaggcattaccatttaggacataggcatgggcaaagacttcatgagtaaaacacaaaaagcaatggcaaccaaagccaaaattgacaaatgggatctaattaaatgaaagagcttctgcacagcaaaagaaactatcatcagagtgaacaggaagcctacagaatgggagaaaacttttgcaatctatccatctgacaaagggaaaatatccagaatctgcaaagagcttaaatttacagaccacatttcttattgcaaaggtctagagtattgtatgtctagcattgctcagataactttgctccatgacactttcctaatcagttcatttttgggggacagagtaaagttcagaatgatattatttcctaggctttttcaagtgatatattcagaaataagtcaaaccaataatttatcaaatgttctgctcttagtgaaatatatgtacagataactaaagttgcctatcacaaatatatgccactttacctattttgtaagctataatatattgacttaaaaaaatttttttgagacaaggtctgactctgtcactcaggctggagtgcagtggtgtgatcatcgcccactacagccttgaactcctgtgctcaagtgatcctcccacctcagcctcccaaatagctgaaattacagacccaagccactgtgcctggctaatgtttttttgtatttcttgtagggacagggtcttgctttgttgcccagcctgatcttgaactcctgggctcaaacaatcctcccacctcagcctcccaaaatgctgggattacagatatgcaccactgtgcctggcctgataaaacttctagagggtcacatagcagtggtatgaagcaggtataattgtcttcattctgtaaatgaggaaacacaggcttagaaaacagagaacaggtaagtcgccataggtaaaagctggtgagggttaaaagttgcctccctaatctggattactagatcctgagctgtacaaaattaacagaaataaatatctgataaaggtttgtaagacaagcattgcttatttagtagtcacatgaatcaatatcccaagtacagagcacacctaaaatctgggaggaataaaactgaagtcaggtttatgaatatttgaaaaataaataaatctttccatttggacatgagaaacatcattcttgatttatttgtcatcactaactatagttgaagaaatactctcaccaaccctggttctcccgaacagctatagtgacatgagcaacttcaagtcttccccctccccttcccagtcccccaagaacaggcttaggtgtagtgatggcattgtcatgttgaagttgaattgagagctttttgtctttgttgaacaccaagaatcaggtctggggggaaatctgtaagtactataattaacttcaattttaatttctgggtgtctctttcctccctactgcttgctgccaaggttctccttcagtcccatcagttagagcagcattcacaaagctcaggccagactccttttggcaatttttaagaggtttctgggtgatgtgctcaagctcctctgggaaacttggaaccaaactgaagtgtggcttgactattaaaaaggggccactagttttaagaaactactttgcctttctctgtttgggagaaacttacggtggttgaatttttaatacttcttggtttacaaattgttttggtatacacttaatctttagtttattttttgtagtttgtttatattttattattccttccttttctgtcaatattcttttactttataagtgttcacacatagatctatgtgtatttgttctatgatttgaatgagagcactgaaagacccagaaaatatatctctctaacttaccctactgttgtttaaattaagatcctcactccttttaaaatccaatttatgttacttggaagttagatttcatatgatctattataatgttcacttgcccacagattaatagtgaaccagacagaacaagtgaaataaaaataaaatctacttgaggagtcaggcttaatgaataaaaagtcctactatgtaatttgttgtagaaagaggacaggatgagggcaatgtggatggactgaaagcaagcaggcaaccagttctattctgacatttactaaggagtaaaaatgtgcttgatgtactaggtattttgcaattttaagaacttacgtgacacaatttcagtcctcaagatgctcacagtctagacagggagacagaaaagaccatagaaagtaaaaggcaatgctatgggaattacctaggaaagatatttctttcaatgaatgtagaagatattgggaaaagttcatggaggtgattgcatttgagccaatgcttaaaaggtgaacaggaattcaataaacaggaatgaatggtaaagacagttcaagagaaaaaatagcttatgccattgtcatccacagaggtgggaaaatgcaaaccatgtacagagaatgtatgattaaattgaaagatttccatgaagaccatagaattgaaagctagaaaagtaaactctccttttttatgactttgctagtggcatatatccaagcccaatgctgctcactatttttaaagcgtgctttctttccataagaccttttgattgggaatcactgtaccaggtcttttgttggcatatattttttttcttttccttgctcctcagtttacctttttttcctatttgatagttcatgtatgatgtgtccatttctatcatgaaagctgttgaaagatactgattgaaatgattctttttgaattaattagacttgaacttagattgccatatctgacttttttctagtctcaaatgttaatatatgtttttattttatagatgtcaggttcaaattcaggatcactattttttttctactaattccgattgacttgtatcatctgatttaagttatatccatctctgggcttcagttacttccatggttatgtgaaatcacaaatttttaggtatgtcagtgaatctaaatgtagataaagtaccttattctctaaatttgtctccttatagggtattacctaatcatttagttcatcaaaaggttttgaagaagactttgtacaggatagacattgagggccagcccctggcatctggaagctccttctttactccctcactttaaaattctacttttgtcagtaaaaaaatttgccattgctgaaagtaaaaagatatcttgatttttgatagcttttcctaaccttacatttattatttccagagccaaaagttctcattttcaggaaaatgtgtcatcattattttgttggactcataaaactatagtatttaaaattattatactgttgaaggtgactattagcatgcatattgaacatatcataggtcactgatacctcttcttccaaatacctaactggtaagggtagccagattctgtttttaccttcattttctactccttttcaagatgtgaaggcaatacattcttctattgcttccatctgctcccattggcccctttttttttcctttttttttgctcacagtgtggaaactgcagttacagcttagcacgttttgcttatggaacgttgccagaagcagttttgaaggtgttttaaaaatgaagacatctggcagctggcatacttacaattcatttgccaaagacaagttgcacgctgctggaattttcaactgaagggtcgtgcaccaggtaagaaaggagtcaggtggagctggtgcataggcagccacacactgaaaaactgttggctctgtgaggttttgatgggctaaatcaggaagcatgtgtgtcatcttcttgtccagcccaccgtctttgtcactataacactttaaaagaggtaaaaggcaaaaaaaaaatccaagctaagaaaattggcagtgaatcataaggctgtgacatgtcaataaaagtcttgccaatttggcaaaagaaaagagtgctgagagcaaaaaaaaaaaaaaaagttgaaaaacggaatttgacacaacattggacaaacatgttcctgtcagttgtctggttctgtttttttcaggcagaaagaatctgtgggattatggatttacagcttaccctctaagtgaattactaacggtacaccaatggatgccctctgactgaaaatttacttggtatttcatagtattagcatagtttttggggttttcagttttaaaatcttttcttgtaactggtagtcactaaatactagtgctactaaatactactttccaaataattggtctgtgtgattttacacttgtattaaattttttgtttgttttgagttttgttttgtcttattttgtttttgctgcaacaaataatttaaaatgtgaacatgggagttttataatgagattaacaattgacctagcagagcaagggagggaaattatctcactatattgacaatctctctctgaccaatttgagcactttaaaagaaatgtgagccatatttgacaaagaagtaaggagatttatgtgtataaagtaataattagagatgacttgtactagatgttagtatattttcatgcaacaagcctaggtttttttttttttttttttaccttctgtacttgtaagttcaggtcagctgttttaagtgggtgttcctgtcttctgctcaaagtattatgtataaaagtattggctaatggagaaggaagaaggaaatggtgttgcggttacagttttgttgtaagagacagttgacacttaccttacctaaaatgaagacagaattaccagccttagagaggttgcaaacttgtggcctaggtacagaatctagtccaaaaatatgcacatttgacacatgcactatcatcctgcagatagtttacattttaaaaaatataatttaacaggagagtttatatttttaaaaaatctgaatttacagttatttttatttttattttttaatcgcaagatcaggcatcactccctcttgaaaacagtctgctagccctggcccgcttccagtagtgtgaggagcgtgagtacttcccattcaccggagtcctgcacacctgtttcctcccccaggttgaatgcaaattgccacttcaatgcagtcctgctactgtttttccaaaattagagtgaagaggaaagtgaactgtttcctgtacctttgtatctgtcaaaactgagaaaataaaaacaggccagaggggcaggtttttctcatgccaggctcccttccctcagtggttctgtctcctcggcccctgtcctcctttggatttgcttcctttcttcatgaagtaccttctctgcccacctcaggttctgtgggttgagactccagggtttccagctgcctcctggtctagcttggggtccttacccctgtgacccccagtggaaccatggcaatctcacaaatggaatcttcttaaagacacccaacatatagcgcattcctggatttcaaggcagggacttggtaaactctttgatagtattatgccacttaataatgtactttttgttcatacgtttcctcataaactggtattgcctttgagaggtttatctcctccattaggctctgcatctttaattgaaatttagcaattacaaaatctgggaatacttttcttttagcttttaaagagaaaatactataaacacatatgagggaaatgctatgtgggaaaaatgaagacctgagcctggtgattttagtggtcagatatgaaatcaatgaggcagtaactagctactcttttcacagggcatccatttagtataattgctccctgaagagaattttatccttcttagaattttaaactatgtgaagtaccagcaagctctacttcatgtaatctaaattggagacttgagagatgaattataaatgcttagaaatggattttagaaagaatattgatgatttgtcaactcttcatctttcctttaagacatgtttgtttttgttttcgcccgtcaagtgcctgtcagatgatgccaatctgaaatccttgccatgttttcattcatcgcataaagccctccattcagaccttctagtatatgaagccagattctatgaagtatttcattacagagtattgtaccctctaaaatgatctgggaaaataattactacaaaaacattagttctcattctccttgtggatgattttaggtctttttcatttataaagaatgttattactaggttaaagggaagcgaagtatagtttgttgatcgcaaatgtaatttccagtaagaaacatcaaatgggagttgggaaagtgggaaaagttgattattggaaagaggtgcatttttaaggaacaattccagatgtgtggagaggggatgggagggtagggtacatgtcgacagtagagtgtcagagacttatgtgttctttttaaccattcagttaaaaaaaaaggtaatttgaaagtgaaataaaattacatttgatttcacaaataaataaatgtgagaaaatttccacttataaaaaggcaacctaaaaatctggaaaatggagctagttacagtttttcatggtgggaatgttctctaacattctttcaacaaattttactaagcagctattaaacaaattttactgagcacatactatgtctaaagtactctcattcaactctagaaggaaattacagtaacatttcttgaaagcctattttatttttgttttgaaaaatatattttatattaatatttattgacaaatataacaatgcttgacattttaataatgatagagtttgcaaattgtttatatttatgatttttaaatgatagttctgtgggctaagcagcaaggtactattgcctctactttatgattcagaaagggtaagtgacttatttaagagcacacagcaaacaaataagtagtagaaacattttcctggctcagtgctttgtacagttcaccatgctaaaagagatggttatgttctctttatcattacaattggcattgaaatagattaatattaaactcagatggaataatctaggggtttaaattttgggtgattcatacatgctatatgctaaatgctatggcaggtgctttgtgtacagttgaaaataaaacagaagtcgtcctaaagtttacaggctaattggaaagacagatcttaaataaattattacacttgcaggtattccaagaacaaaccaggcatgctcctgctctgggggcatttccacttgctgttgcctttgctcagactgctcttcccccagatatctatgcagctccctccctcaccatcttaaagtctttgctcaaatgttaccttctcaatctttgtctaattctaaatgcagccaaatgagcattcacgtgtgacagcaaaatgaagcaatgttaggaagtccattcagaaagaaatattcaaggaagtactcaaagaaaacaaacaaacaaaaagatttcaggagaatgaaattgaatacaggaaacagaaggtaaaaagaaaccaatgaaccttctggttaagtagatatctttacagtctgtacatttttacaaatattaagaatgtagaacgaaactctagatgaattcattatatgatttgaaggtcaaggcaatgttggtaaaggagaaagtaatagcgtgctgaggtttattgtcttttactagggaaaggtatacacatttaaacaaatgagcttttaaaattcacagctagccaatacaggaacagaaacaaagcactcaatttttaaatctctgggaggggaagaaaagtagagaaaactcgatcagtcccccaaagagataggggaaaaacttacttttaagaaaataaatattaactatttaatagtggtaatatgttcaaacatattaataatcatgaatagtgcaaaatgttaattctcctgttaaaaggcagggattatcagctcatgcctgtagtcccagcactttgggaggccgaggtgggcagatcacaaagtcaggcgttcaagaccagcctggccaacatggtgaaaccccatctctactaaaaatacaaaaattatccgggtgtggtggcgcgcccatgtaatcccagctactcgcttgaacccaggaggcagaggctgcagtgagctaagattgcaccactgcactccagcctgggcaacagagcaagactctgtctttaaaaaaaaaaaaaaactaactgcttcctatttgcaagagacacttccgaaatgaaatgacacagcaagattaaaacacaggatggacagagttatttcagaaagatgctgactatcatagagaaataccagtttaagacatattaatatgacataaattagatattggggccaaaattgttaaatgtgacaaggaggaagatttataaatacaacaatccattaagatataaaaatcacaaattttatttacctaaccatggagctttggcatatataagaaaaacctattagaaatacaagtgatactgttaaattcataatgttattggaaaaatttagtacatctcctagaatttgatgattaaagtatccaagaaataataagaataaataggatttcaaatgcacacacacacacacacacacacccaacaaatagaagatacacatttatcaaatacacatggattatttatttttttaatttacaaatatgtttcaggaagcaatctcaataaatgtcaaagaaaaacaaattacacagtcatgttctctcttcaatgcaacaaaattagaaactaataacaaacttatagatgatacaatctaactacttgggcaaagttttaaaaatcatttaattcctacgctgtaggaagaatctagaatacaacattgcccaagtcatacatagagtaactcaatacagtgaagctggcagttctcctcaaattaatctgtaattcaatgcattaccaaataaaaacttaaaagttaactctgaaatatatctggaggtgagaataatcgataaagaaaagaaaaatgtgagtaaaatgtcttctaaaaccttctaaaatatcagagcatactaacatgttaaaagagtctggtatcggccgggcgcggtggctcacgcctgtaatcccagcactttgggaggccgaggcgggtggatcatgaggtcaggagatcgagaccatcctggctaacaaggtgaaaccccgtctctactaaaaatacaaaaaattagccgggcgcggtggcgggcgcctgtagtcccagctactcgggaggctgaggcaggagaatggcgtgaacccgggaagcggagcttgcagtgagccgagattgcgccactgcagtccgcagtccggcctgggcgacagagcgagactccgtctcaaaaaataaaaaaaataaaaaataaataaataaaaataaataaaaaaagagtctggtatcaatgtcgggggcagacaaatagacacataaataaatgaaatagaatgcagagtccagaaaagtgaattcaagatatcaaaaaggttgtattttaaaccataaaatatagaaaaatatttttatagtaattggagtaggatgagccctgttaaggcaaaacccagaagctaaaaatcaaatgattaatggattttaatacgtcaaattaaaaacctaagtttgacccaataaaaatcaataaacaaaactaaatgacgagaaatagactgggataaaatatttgctatatataaacaaaggattacataggattatatataggatatataaataactcccaataatgaacaagaaaaagttaacccaacagagaaaaattgctcaaaaaggcaaggaatatgaccaggtaattaaacaaagagaaaacataaatggctagttaacaaataaaaatgtgttttacctcaatagtactcagataaatgaaaattaaacagaagtgagatataatttttccagtcatcagattgtttttttttttatttaattgctaaggtttagtgttgataacgatgtgaggaaatgaatactcgtatagccttgcatccagcccctcactttgagacttctgtagtgaacactgttggctgcctgcacagggtttccgccctctaaaaccctgatttcttcaatgttgctccttcctatacatcctgtattcttcaagggaagctgacccaccccctgtgctagggatgaatctgactgaactaaaggtaatttcagccccttctccctccagtgatgggtcagaaatctggacaatgaaagcaagaaaaattttgttggaagttttcagaaaagtttttttgctcttaaggagaacatcaagaagccaactgtgctttctcccacaaggtattgcaaggaagaatgtagcctgaagcttctttaacctctgaaattcctcttataggaacagataatttttctacaacgtgctagacaatattctgggtgctgggaacagacaatgtacaaaacaggcaaaactcactgcctatgaaacatttttgggaggcagatagaaacaaacaagggtaagtaagtgaaatatattgtttgacaaataattaagcagagaaaggagattaaaaatattggggtataataaaaataaggcagtcagggaaggcctcctgaaaagtggacatttgagtgtattcttgaaggaaggaggaagaaaggtatactgacatttaagaggaaaacattccaggaaaaggaagaaattggtatagaggccagagtatcctggaatgttcaaggaagagcagaaagctctgtggggcgggatcagaatgagcaagaagcagaataatagcagataaggtcagagatgacagggggccagattgagtacggccttatagactgttataatggctttggtatttttctctttgtgaaataagaaaccattagaagattcagagtggtgacgtggtcttagtttcatttaagcaagatgactggttgctgagttggctggactgtcaagggacaagggaagaagtagggagatagaagttagtggtttaatgcaataaaaccagggagtattgacagcaggatggactaggaaagtggcctggagaatttgaaaaacggttgagctctggatatattttgaaggtagagtcaacaagatgtgctgatggacaagatacagggtaaagaaaaagagaagagtcaaggaagacaccaaagttttaagcctaagcaactcctcaagaatggagttgcccttaactgagaaggaaagctggtttggagtaaaagtgggaaatctggggttcagtctgattttgttaagtttgagatgctcatgtcccaaagtagagatgtcaagtgagcattaagatattcaaggctagatttcatgaaaaggttggtttgaaggtaaacatttgggaggtgtcagaatccacattacttaattacttaataccatgaaatttgtaatgagatcaccaaaggagggaacagagagaaagagaagacttggctgtggggcactccagtgtcaagatttaagaaagccagcaggaaagaataggcaagaagattgaaaaggaacagccaagaagataggaaaaaatccagggaacatggtgtcctgaaagccaagtttaaaaagtgtttttagcagggagcaaccaattgagttaaatgctgccaataagtcagcataacatagtggctaagataaaggttgtaagctattttgccaggttcaaattccactctgccatgtatttgctttgtgactttgaaaaagttactacacttctctgtgtctttttctccatctataatctgatgattataatggatcccatttcatatgacttttgttaggcataaatgcctaaatttgtttaacatttagaatagtgcccagagtatagtaattgcctagtaaatagcagttatgcttattattaccataaataataccgagaagtagtagtattaggaataagaaaagtactgagtcttgaccattgaatatcacaatgtggaggtaatttgtgacattgacaaggagcaatttgggttaaataatggaaacaaaagcctatttggagtgacttcatgtccaaaaataatggaagaagatgaactggagacagtgagtatagaaactgttacaataactttttcttgaaaaagtaaaggagagcagagacataagttggcagttataggcagaagtttggtaagagaggatcttttattacaggagaaataacaggcttcagataataagtgtatttattttaaatatacctaaaatcagagcttggccttaggggagtcattcagaaggcttgctggtgatagacaaaacggaaggtgagcagcactagagaggggctgactttctatcacctccattaaatttattgtttattatatgtctctcacatacaagaatgtagctccagaaaacaggacagtacattccctgctatagctccatcacctcaaacagtacccagcacacagtaggctttcagtaaatatttgttaaatggatgacgatttctggtgaaaatttgagtcccagagaagtttcgtaaattccttgcccagcttatgatgtcagagttgaatctaaaacctgagtctcctcgttctcaatacaatgaacattccaatcctgggataaactgggtttcagaattcacatcctgttcccaaagcagtattttagaaaattaaagctattttcaaaggctgaaatgaggcagaaaaggatggaatgacttcctccttctttcaagattctctgaaatcaccctacattactgaaaacaccaccttttattctgtaaaaaaaaaattaaagtttgttgataatgtgactgttaaataataaaaacttaaatgtcttaaaaatctatatatgatctaacaaaactcattgtttgttgaataatgtaaatgaaaatgacattttttaaaattatcacaaatcttgaccttggtcctattgcacagtctctctagtatttttcaaggactaaaaacaattgaaaacatgcaaatattattccttgaggtaaaaagttaaattatgtataaatgtagcagatactttcagaaagttcatcagtaataggactgctaaggcaattagaaataaccctggatgtcttattctgtagtttaatacaaactagatagagagcaagattgaaaggttaagagaagaagtgtgtttctctgtaggatttattcctgaatgtttagtggcattattaactagaaattaataactctagccctacataaaccttccattccatctacataaaaatctctcacaccatgtaaaaaaaagacacggtttttttcttttgcatacataagtaaattagaatttttgtccaaaataagagaactaaaatttgcttttattaactcaaattttatggctcatttatagttctgtaaaactataactaactagaattggagaaatatttttagaatggccagagactataaaaggaagaaaattcatagaacgtcttcagttaactagaggattttagaaaatcttaataggtttaaatcagcatagatagagacttgtaacatgcctgtaatggaagttaaaaattaggtcttcaatcatgtaaccataaaagtatctctcttgctaagtttctgaaaagcataccattgtgaaataaggcaaaaagtttgccagagatttgtttttctccttaaaagtggccttatcctttagcctaataatctcacttctagaagattacttcagggaaataatcaaaaggaagaaaaattctacatgttcaaagatgtttgctgaagtattatgtatataatttaggatttggtaaaaatctagctgtttaacaatagggaaatatttaattaaattggagtctatccacttgaagtgataatatgtaatcattaaatgcatagtataaaacgctcattgtatataaatgcgtatatatggttaaactgtgtgtttattttattaaacagttcaatctcaattaattaagctattgtcatatacatgtaactgcgtgagtactacctggacttaagggtgggaaaaaaaaacggataagtagcactctttataaaatcttgtcttcagaatgcttaattctgtctggttgagccacatgacacactgatagactcttaggttcccagggtaattataggccacacctaagtaatcaccagttaggctttctcattcattgcaactagcttcatgaagcggagaaatttactttattgattctgggtattttgctagcctcttcaagtcattttggaatcttttttcaggcgatatgaagtatctctatatttcagtgcacatctttgctatagaaaagtgattttcggctttgcagcccaaagatgcattccatgtatgaataggagtctttgtgccataagagtaaagtcatcagcttctatgtgatgcagaagaaatgttcatcttctaatgtgcatatatgtaagccacctctttaaaatcagcccctttaaatggcactgagtatgcttctgtgtatgacacatcaatgtccattaattgcatgcagagagaactgagattccaatggcaaaatctgtaaaagtagatatacaaagaaaagtggaagcatctgtttaatatatacgacattagaatttaattttacctctgtgatgcttttgtgtggctgcagtgttacagcagagcatataagcatagccgtgcagtgtcagcaggtgcatgccaccaaattactgcttttaatttgcatattcatctgctaagaagcatgtcattatcatatcaaagggatactaagcaacatctagcttggagagatgtggcatagtttcaataggagcaattaatgcaagatgaggactctctttctgtcatgtctcccagggctagctgtaatcgggctgattattggataccaataagactgagggcccagttggcacagaataagagaagaactggaaagagagcctgctagtcctctctactgtacacttgatggcaatttgacactctggccactcaaaagaatcctattaatatcatagaagctgtctacatgcacccatctgttttagttgtcataaaatgaccaaatgcagcccaaaagtaatgtattttaaaaaagaagaatctcgacaagtgggcgtgaaacagaaatgtgaaagaggcattaaaattgtgtttacacatatgggttttagtacctaagtaattttcatttaacaaacattgtcttctttcttcaaacatttattgagcacctacatatatgtcagacagtgtcagaacctacagatacagacataagccagtcacaatccataatatgaacaaacttgcagttgagcaggggaggtgtaaaccaaacaaaacttggatcacatttaattttttgtgtttattagaaaaggtcaaaaacgtgcaaaaccatctttttgatatgatagcaataacacagtataatttctttcaaggaaagccttttcaagaacagaatttttaattttagttaattttggaaactatatcacttttcctttcttaatgaaagtagctggaaacagtgtgaaaacttgaatattaatagttgaacaatggaaatatcggtagttttaaaattgtcctattgtttctcaatttttcattggatacactgacataagtaatgcttttaaaaagcaggaacaattcatagtttgcttcttacagtgtctaggatgggaagttacaaacacttcattaaattgttcaacaaggccaggcgcggtggctcatgcctgtaatcccagcactttgagaggctgaggtgggtggatcacctcatgtcaggagttcgagaccagcctgaccaacatggtgaaaccctgtctctattaaaaatacaaaaaattagccgggcatggtggcgggcacctgtaatcccagctacttgggaggctgaggcaggagaatcgcttgaacccaggaggcagagattgcagtgagccaagatcgcgccattgcactccaacctgggcaacaagagcaaaacactctctctctctatatatatatagttttgaacactcatcatgtaccaaatgcttctacaagcactgaggatatagctatgaacaaaacaagccattctcctgcccctgtgcttacattcatacatgctcctgtgtgtgaataaatgtaccagccacatgcctaaaggaaagctcaatgacatttattcaacaaggatttaatcaacaccctatatgcaccagactagtcaataaagggaatttaagttcaccttggaaactataaaatggcagtgagtacaaaaaaagctttccaagtggccagtaaacctagaactgaatggtttatgtgaagcaagacttaagaatgtcttcttttatgggtgtccaatctttcaaagtagtttcagacatctctaaaaccagttaattcagtatagcttcagaaagctcaccaatcccttcacttgtcaatcgttgttaaaattcagggatgaggtattagaacttagtgagcatcagatccaggcaattcgtttgcatcatctaatttagtactcagacgaatcctttaagatataggctaatgaatccaatttgcagataataaaaccaaggctcagagagtttatgtttcccaagattacccagttgagaagtagctgaataggattagaactcagagttttctaatgccaaatatgtgtactattcacagcatgttttctataaacacagcattcaatatcccagtctaatctattttttggcaatgaacatgaatatcagaactaacttatatgattatagttaatctttttgagcaagaacaatatttgcccaataccactcttttaccttattatggtgggaattaagggttaaatgatgtatactgtatcaaaactactggttgaaatttaagccaatgaacaagaaaatggtctctttatatgttgctactctggttaagttttttaccaaatgaaagggttatttttaaccttaatcttattaagttttaaattaaacctatgctgagaattatgaactgagagttttcattttttttttttaagttgggtttttggtagagttgaaaaagctgctgacttgggattccaaagacttgggtttaaattttggctttaaattttggttgtctgtgaataatacttagccataagggtctcagtctttttttctgttaaatgaggaatttaatctagttgctgtctcaggttgcttccaagtctagctttctatgattctatgaaaaacagctagcaggagctctactttaaatacagcagataaaatatttgaacaccccatacttcctgaattcttctttcctgcaaaaaaaaaataaaattgtctagtatgtttttaaataatgcctttaaccaaaactttagcagatggtaattatcgattgctcccctctcacaaaagttggttacattgcagcagtgaatgtttacttatttctttgttacaaagaaggaagaaaggaaaaaatgagaaaagaaaatgaaagggagaaaggaagccagacttgtgtacatgtatgttacatacacacaggtgatcatattgtcaatttttttaagttctatgatttgcttctaccatagaaaaataaagacaatgttacccttcaacaagtgatattcccagtagcaatcatggcatcctcccttaagtgaaatgggaggttctacaaatgctagagttccgcagaaatttttatttatttatttcttctgttaacaacagtaaattttatgaattaactatgaatcaacttatagctttttatatttataactataattattcatattgtttatgactatcaagtcaaacatcacttaattatcaaccactgtaggcatttggatatttcctttttcctttttctttttgagacagagtctcactctgttgcccaggctgaattgcagtggcacacctcggctcactgcaacctctgcctcccaggttcaagttattctcctgccttggcttcccgagtagctgggattacagacatgcaccaccatgcccagctaatttttgtttctttagtagagactgggtttcatcacgttggccagtctggtctcaaatgcttgaactcaagtgatccacccacctcagccttccaaagttctgggattacaggcatgagccactatgcccagccaacatttggatattttctaactgatttatttaagcctgaattcacacaaggaggtcttcaagattaatctattgtttttaagagaccccaattcagatcaaaaccttttctaacttcacatataactctgttggaagcatactcaagggaaagcacctttcacaaataaatgtcactttcaactatcagttcactttttcccctctcatcaatcttggtacaatttcccaaacttctatagagtgagtgcaggtataaaaaaaaaaactcaatttttaaaaaacttggtacagattttttgtttattattcataatccacagaggaaagttttgtgtcatctgttatctatatggcttataatggtgacagagatactcagcaagtccatttacaaacctctgatgtccattttcagctgctgcggtagggaatatgaaccatcaatgctttcattggaaggattcaaggtacttcacacctacctcatggaaacaagaggtattgatatattatcggatttttaggtttctaaagaaagataaagaggctactttcattcatttatatatgtatatattaataacagtgagctaagtggacacagtagaacaagaaaacgtagtgttctttagaaagcctaggctttattggtgcaattcaaatggccagatatcacatttatgtctaaaaaagaaaaacaaaaaattttaagtgatgacatgggttaaaattgaagaaagaactctagtatcacacgtcaggcttattgctgataggggaaggtagatacgaataaaggaagataaaattgtgccattgacaacatggggaaagtgtgtcatggtacattttgttttaaccgcataagagatgaagggtaatagatccattatatgctgtattatgccaaatcatagctagaaatccttgatccatttcagaagaaatacttggcagcaaagagaaatgaatgcttaattatttaattaaaactaacctaaaacaaggacaaatcctgaaattatccacaaccacatgacatgaggtagatttagatggcaaaaggaaattaacactttcccaagtagaaaattagtgacatacaggtattttgtttggctgctttaaaagtaggaaaattttacacttaaaatagctagtttgtttctcttttcttaaaaagtcaaaagactttagagcactgacttagatttctacatgacaattggaagaaactagacagtggatgcccccttcgaattgagtctcttctattttaccataatccccaccagcccctttcatcttacctgcagcttggttacctacctgatcccctgtaggtttgtttgtttgtttgttttcttttttatttttatttttttgagatggagtctcactcaggctggagtccagctcaggctggagtgcagtggcacgatctccgctcactgcaacctcctttcttcgcctcccctgttcaaacgattctcctgcctcagcctcccaagtagctgggactacaggtgcatgccaccacactcggctacttttttttctatttttagtagagacgaggcttctctgtgttagccaggatggtctcaatctcctgacctcgtgatccacccacctcggcctcccaaagtgctgggattacaggcgtgagccaccacgcccgaccccttgtaggtttttgagcattcaacccctgatatcccaagcattactctgggccacatattttatcctggtaatccttgaaaatatctcaagagacagcattattcacattttaaagacaagaaaaccaaagctctgggaaatcaggtaactggcacaattgttaatctaatatagactatcatgctctttctttcctctctccataaataatgttttaaggattagaaaagtttagaacagcctgggtgcgtggctcacacctgtaatctcagcactttcagaggctgaggggggttgattgcttgagcccaggagtttgagaccaaagtgggcaacatggtaaaaccccatctctacaataaatacaaatatttgccaggtgtgttggcatgtgcctacagacccaactacttggaaggctgaggcgggaggattgattgagcccaggaggttgcagtgagccgagattgcgccattgtactccagcctgggtgacagagtgagactccgtctcaaaaagaaaagtttagaccagtcattttcaaagttacttgcatattagaatcaattgagaagcttaaaaaaaaaaaagtgtgagctccatcccaggccatataaatcagaatctctcgaggtggttgcaggcaaagattgtttttaagtttctcagctgattttaatgttcagccagggatgcaaatccctagcttaggtatcaaaagacaagataacttccagtttctgctgaattttgtttttaatagttttaaaacacatacaaagtcagacaggcttttggctttacaaaaaacaatgtacttgaatgttttacttttcaaagtgtatattgagttgtatcagcaaagcattaacaaaactcctaaagtaagttggatttgacctaactctacatggattttatatagccctgtttgttaaagtactgaaacaaaatgagtatttgaattctggtgactgtttgctgtaggtatcaactatcttcacacagctgaatttaaactttgcaggaggccgggcgcagtggttcatgcctgtaatcccagcactttgggaggccaaggtgggaggatcgcttgagcccaggagtttgaaccaacctggtcaacatagtaaaaccccatctctacaaaaaataaaataaactagccaagcatgatggtgcacacctgtagtcccagctactcaggaggctgaggcaggagggttgcttgagcctgagagttggaggctacagtctaggccacaaaaggagaccctgtttctaaataaataaataagtaaaaataaaaaataaacttagcatttataaggcgcagctgtcctctcactatattcagcaattaagttttattatggttccctgggcaaagcttgcatcttttctgatgccttaggcttgctttaggtggtacaccaaaagcccagtttcatcaatcagccaaaaaaataataaaactgattgactacttttttaaaataagaaattattctcatttaactggtcaaattgttgtaggtgtgcttgtttgcatgtataggcaatctgtaatattaatgcatataactttttattaaattattggaaaaattcaaagtaatgtttttgtggatcaatccaactatgactggccctgaacaaaggaggatgagagttgaaaatgtaattatttactcatggcaaagtgtggcataatttttgctttaaaataaactccatgcattatagatgagaatttgttttagaggtctcattcggtcagaaaaaagccgtgcagattcttccttcttttgaaatatgtctttaccagtaactgtactggaaatgattctacattaaagtgagttttgatacaaatttaaaaagcagcaccatctaaaattagaatttacttcagacgtgacttattttgatgcatcataaaattatgaagatcaattatgaagcaagttttaagattgcgatgttctccatttttgcaaatagagcactagctagtaaattttagaatttggatattcatccaaaattagaagctaaagaagcactggagttggctataattaaggcatgggtaagtggagacctcataagcctgctttcaacaggtatatgttaatcacttggcgtcagcagcctctattcacatccccaaagccagctcattttagctcattaattctcaaagcgtcttcataagtaggaatgcttataaaaatctattttgcaatagaatatagggaaagaaactataccttgtcaaaggtgagactgaaactttttaaggggaatttgtattattttaattatttttatgtacagaaaactcagcagtgtacagttaaccctttagtggcgacttctttagcctttgcctttccagcttggctatgtgagccacagatatgggacccaggacaatacctccccagtgacaacagatctcatcatatgtgtcattgtaattagtcctaatagcttccaccagcttagccaaagctcttttgtcttctgagctaacctatgtgaaggcaacagtggtacaggtcttcataaatatcccagtcttgccttccccttaataatgcagtaagggacccccattttatgagacggggcagacgggtagacaaccaactccatgagatccacgtcatgtgcagtcactaccagttgagccttcttgttctccaccagctgagccttcttcttctccaccaaagtgatgatggtggtaactccttctagaaggacaagtggtctcttggtggggatgtcccctttgccagtagctttcgtctcagcatgggccaatagtctcttcttctgttctttccatgtctctggtctgtacttgtgggccagcttaagcagctgagtggctgttttggaggtccaaggcctgggtaaactggttaattgcaggaggcactttcagctacttatagtggatagctctttgacacggcaacctgatatagtggggccatttgacaaagcaggtgaggtcccttttgagctgaatatcctgtccaatggcaaaatttttaggccttttctctaacaggggattcacccctttcctggcctcctgcttcttcaagacagcagggtctagagccaccttcttcccgttggccttctttccgtgttttgggtggcagaagagacagtgaggttgaaattgtaataaagtttagatcagggtattggacacagtattttagcctgtatgaggtagataggtagataagcacatacatacatacataaatacatacaacatatatgtatatgtatgtatatatgtacatatttacacttacaccaaatatagatatgtaatacttagaaatacaatgtacattttgatattaatgtcatgatatcaaattccatatgatgacataaactttagagtcaagttgtaaataacaaaaactgattcaaaccaacctaaacaataaatgggataaatcctatttatccctttaactagtataaccagcatagctaacataactataaaatgcaagggacagacctggcttcattcagtgacaaatgatatcatcagggctctatcttggtgtgcttctcagactgtgtccacttggcatcaaggtggtgctggcagcctcctttcccctaaccccaccatcattcccattgtatcagctcagcagcccctccaaaaaataatttttctttctcagtatctgtaacagaaaagcccagggcaggatcctgattagcctgccttgggtcatttgcttgcccatactgatcactgtggcctgaagtatagggttctctgattgcccatgcctaggtcatgtgcccacccttgtgtctgggtgagggacgaaaggggcagtgtctttttgccttcaccaaccacgtgaatagggttccctcatggaaaagaatgttctgatacgaagagaatgtagagaagggtagtgcctacataaaaataacatatgttctgcttcaacaaacaaggccctttatacgtggcccctgcctagtagtgtagatcttttggctctcattccccataaatacattaattctagtcagacccagttactagagtttcctaaacttgatgtggtcgttgactgaatgaatgagcaactgtatcagtagaggtgcctctatgctattattaagtttgtagaaaacttgaggcctcctgaagagtccagattacgtaaaaaaaaagtcatgttcctaaatgatctttattattttataaggtattgactaaatatgaaagtggactcattgatgatgtttatatatgatattgactaaatatgaaagtggactcattgatgatggttatatatgaatgtacttctacttatgtatgcaaatatctgtctcctttcttagaataaaggcaggaacccatttgtgcttgcagccttcaaagaacctactataatgttatgcacttactatgtgattagtaaaagtttcagaactaaaatgtattagttccagttcttaggcagggcacttcttgcttttccaggatggctattttccctcaggaagctaccaaatactatgatttccatctgtatatctgatgaagagactctgcccaagtgtaaatattctgacctgttagtagttgcccagagcagcctgcataataaaaattgtgtttcctgatttctagattgaagttgagcaccagagcattctagaaatattagggtccatgggtggccaggtgcagtggctcatgcctgtaatcctagcactttgggaggctgaggcaggcagatcacttgaagacaagagttcaagaccagcctggccaacatggtgaaacctcatctctactgaaaaatacaaaaaaaaaaaaaaaaaaaattagctgggcatggtggtgcatgcttgtaatcccagctgcttgggagactgacacatgagaatcagttgaacccaggaggcagaggttgaggtgagccaagatcatggccctgcactccagcctgggcaacagagtgagactctgtctcaaaaaaaaaaaaaaaagaaagaaagaaaagaaatattagagtccatgggtgataaaactcctagttacagagttgcctctattatttgcaggcagattggcctaacctgttttttaaaaacgctacaggcatttttagaaggaagtactaaatatgcaccaattaaaatttgttctgtgaattctttttctttaaatatgggtcaaatctaccatatatactactgttaatagatcacattagtatagtgatttataatctataaattcccattcataaatttcataatacttataactcatgtaaaagttaaaaaatacaaggttttagttgacagcaagtataaagtgaaccagtaagtgcttagttgccaagaaacctaatgcaatttcagactacatcaacagaagtaaatgtctggacaaaggaggtgatattttcattgccatctgtaccagttagaaaacatctggggtgttgtttagctatgggcttcatcaagttctaagagggacattgattgacacagctggagtttttccaaaagatagcatcccagagggtgtaagagctgaggccaagtcacatgagtaacagctgaaggagctgaagatactgagtcttaaaaagaaacccacaatagttaattgaaaaaatagcaacagactctaaatactaatagggcgaattcttaagaattagaattcttaggagataagaattagaccttttccacagatgagctaaaagctacacattttgattcaatatactttaagttgtcctaacaaaaatattgtttgttttcaaatgacatgatgatttacctgtcactggaaattgtaattcaaagtctgcatgattgtgtatcaggcataccagctctaccatctactagctctgtgatgttggacaagttactttaccttgctgagtctcagttctctaatcttgaaaatgaatttttagtattattggaaggatgacatgattatttacctgtcactggaaatgataattcaaagtctgcgtgatcgtatatcaggcataccagctctaccatctactagctctgtgacattggacaagttactttaccttgctgagtctcagttctctaatcttgaaaatgaatttttagtattattggaaggattacatgagacaatgcaagtcaagccatcagcactgtctgctcagagtacatgctcaatgaggggcagcattattattagactgacttgcaaaggtcttctctaaactatgcaataataatagaggaggaaaataatagtagggtttaattccctaggccctctacctaaccaaaaattgaaaaagattggtgtggaaacctttgtcttctattgtgttctacagtgattgatgttaatgatacttttgtcttgaattttctttgaagcctcagccaaaaaaattatcatttttctttcctaataagcaaaaaatgtttattgaatacctccctgactttatggaataccagagtattatttttaagcacttgaggaggagagttactcaagaggtggtggaagtagaagagggtggatgttgagccaagcaaaggccaacttacaatttgtgatatatgccatgcataaagaaataacgtgagacacttaaagtggaatacatataacagaaatgtataataatatgtagcccaaaagcaagatagaattgatgggaaccattcaaattccatcaaatcacaaacatttggtaggcaccacgtaagactttgaagaataaaagtgaatataggacatataaaaataactataggaaatgatctctgccctaaggattttacacagaatagtctgagagacagaaatatgtagaattcattgtaaacacaaacaaaacaatttaaagcaaatgccatgtgatatggtttggcagtgtccccacccaaatctcatcttgaattgtaactcccacaattcccacatgtcatgggaggaacccagtgagaggtgactgaattacagggacaagtctttgctgtgctgttcttgtgatagtgaatgagtctcatgagatctgatggttttaaaaaggagagtttccctgcacaagctctcttctcttgtctgctgccatgtgagatgtgcctttcaccttctgccatgattatgagacctctccagccacgtggaactgtaagtccaataagcctccttcttttgttaattgcccaggcttggatatgattttatcaacagcatgaatacggattagtacagtaaattggtaccaatagagtgggagcactgctgaaaagatacctgaaaatgtggaagcgatgttggaactgagtatcaggcagacattggaacagtttggagggctcaaaagaagacaggaaaatgtgggaaagtttggaacttcctagagacttgttgaatggctttgcccaaaatgctgatggcaatatggacaataaggtccaggtccagactgaggtggtagcagctggaaatgaggaacttgttgggaactggagcaaaggtgactcttgttatgttttagcaaagagactggtggcattttgcccctgccctagagatctgtggaactttgaacttgagagagatggtttagggtatctggcagaagaaatttctaagcagcaaagcactcaagaggtaacttgggtgcttttaaaggcattcagttttataaggaaagcagagcctaaaagttcagaaaatatgtagcctgacaatgcaagagaaaagaaaatccaattttctgaggagaaagtcaagccagctgcagaaatttgcataagtaaccagaagccgagtgttaatccccaagacaatggggaaaatgtctccagggcatgtcagaggtcttcacagcagcttctatcaccacaggcccggaggcctaggaggaaaaaatggtttagtgggccaggcccaggttgcccatgctgtgtgcagcctagggacttggtgctctgcgtgccagctgccacagctgtgactaaaagggaccaaggtacaactcaggctacagcttcagagggtgcaaaccccaaaccttagcagcttccatgtggtgttgagcctgtgagtgcacagaagtcaagaactggggtttgggaagctctgcctagatttcagaggatgtatggaaacgcctggatgtccaggcagaagtttgctgcaggggcagggctctcatggagaacctctgctagggcagtgcggaagggaaatgtgaggttagagcccccacacagagtccccactggggcaccacctagtggaggtgtgagaagaaggccaccatcctccagaccccagaatggtggatcccactgacagcttgcgctatgtacctggaaaagctgcagacactcaatgccagcccatgaaagcagctgggagggaggctgtaccctgcagagccacaggagcagagctgcccaagaccatgggaacccacctcttgcatcagcgtgacccagatgcgagatatagagtcaaaggagatcattttggaccttttagatttgactgccctgctggattttggacttgcatggggactttagcccctttgttttggccaatttcttccatttggaatggctgtatttacccaatacctatacacccaatgtgcctttacccccattgtatctaggaagcaactaacttgctttgattttacaggcttataggtggaagagacttgccttgtctcagataagtcattggactgtggacttttgagttaatgctgaaatgatttaagactttaggggactgttgggaaggcatgattggttttgaaatctgaggacatgagatttgggaggtgccaggggtggaatgatatggtttggctgtgtccctacccaaatctcttgaattgtaactctcacatgtcatgagaggaacctggtgggaggtgactgaattatgggggcagatctttctgtgctgttcttgtgatagtgaatgagtctcacaagatctgatggtttttaaaaggggagtttccctgcacaagctctcttctcttgtctgcccccatgtgagatgtgcctttcaccttctaccatgattgtgagacctccccagccatgcggatctgtgagtccaataagcctctttcttttgtaaattgcccagtcttgggtgtgtctttatcagcagcatgaaatcggccaaatacactgtggtaaaatagaatagaaagcagctgatgcaagttagggaggtcagtttgcagaagtgatattggttggtattggtcttacctttctctaagtggtgaaaggaagataagcataagacactgagaataccagtagtcaagataatgagatgtggaagagcatcagtcttccagggatggcaagctgtctggagtgatttgagtatagaaggttgtgaggaatgacggaaaagaaggaaatggacccagaaagtcaagggctgtcagatgttaaggaggggaaaccatgctaacaaaccgaataaggaaaggacctttggggagcttccacgagaacatattcactattatgtatcatcccttgtggggttattgatgacttgtttgggccagagggtaaccaaatgtcccgggaatgttgctgaacttgtgttgagacaactggtagaggtctcagactaaggagatgagggaagatataactcagagagcaattaaaacttcttgcctgaggagtgaaatcatgaaaattgtgtttggggaaggtcagacaaatacagtagttatgaaggtgagaggggaattgactagaggccaggaattaggcttcaagacaatctgaaggagtctgtttgtgtgtgtggtctggctagggaaatggttaggaagtactgagataggaaagaaacaacagaggagtaagtggaaggattagaaaagaaatatgtaggtgtcaagggaaggagaggagtaaatatactatatagaatccccaaagtagtgctgtataaccatatatatctgaaggatgctatgactcaggttgggcttttggttccttttgggttcctgtactgtactactgttctgcttttaaaaaaggaagaaaggaagaaaggaaggaagggaaagagggagagaaagaggaagaaaaaaacactatcttgctatctcattgaaagtcttctttccttatttccttaattttattatttatttatttatttatttatttatttatttatttatttttgagacagagtctggctctgtcatccagctgtagtgcagtggtgccatctcggctcactgcaacctctacctcatgggttcaagtggttcttgtgccttagcctcctgagagctgaaattacaggcatgcaccaccatgcccagctaatttttgtatttttagtagaaatggggtctcaccatgttggccaggctggtcttgaactcctgacctcaagtgattcacccaccttggcctctcaaagtgctaggattacaggtgtgagccttcagacccagcctatttcctaattttaattccatacaatcataacttctttattgggtatatagatcctgcactaaggaagggaatttctgcataaaggaactaaaaaggattaatttccctcacttaagtttgcaacaactaaagcagaaaggaaataggcttttattgtttggagctttgtgagcaaatctacagtggaatttttgttatttataaattggagtattctaaagatgactgtggagcaagctttgtcatctgtgggcatgataggccacttctaaacccaatcttgttaattagggatgcaacctcttctcagtctgttgtcttaagctgaaaacatcaaaagccatgatgttttctatacgctttgactaaactctctaagaatttattattaaaattttgtgtggttatatccgaagattttgttgcatgggtatttcgtcatcagtagtaaaagggggcacataccttggtgcatacctataatcccagctgctcaaaaggctgagacagacggatcccttgagccctggagttagaatccagcctgggcaaccaacatagtatgacctcatctttaaaaaaaaaaaaaaaaaaaaaggaaaaggagggcaatctaagtttctcataaaatggaattagttaaataaattatgatgcagccatatgatatacaatgaaatattctacagcctaataaaatcttatatcaacacattatttaatatcataatgttcacaatatggtgttaaatgaaaaggtacattaaaaatagtctgtactgcataatcctatttttataaaaattaattatatgcatatatgtttgtgcatagaacaaagaattgaagaatattcattaaaatataagttatctttgtaggaggttttttggctttcaaaaatagacactttattattgacagtagtgaaaaaccaaagctacttaaatgctcaacaatataaagtggccagataaattagggtacatgcagaagctgaaatactttaatgtcattaaaattatggttcttggaaaattttagtaatgcccaaagttgtccataatgtaatattaactgaaatatatatatatatatatatatatatatatatatatatatatacacacacacacacatttggacagttgccaagggcttggacagttgccctttgaacgctaatacacctgtgatgagaagggaagtatcttttatagaaagaagaagctacttgagagagaaagagagacagagctatctctgttgttagaaggaaagctttatgacaacatgttttcaggtttaatggttctaattttaaaatatatgtatatacataaacacacacacacgtgaatactttaagtatatatggatatatacccaaatattttccgtattttccatatttgggtatgtttaaatacatgttttccacatatatttggacatgttttacctgtgtaattaaaaaaataaagttctgtgtcttataataaaacacagaaccatgtaaccagttctcagacttaagagcaatacattttttaatataatttcagcttttgttttagattcaggggggtatatgtgcaggtttgttacctgctatatggcatgatgctgaggtttgagatatgaatgatcccatcacccaggtagtgagcatagtatccaataggtagtctttcaaccctagcccatctccctccttccccctttagtagtccccagtgtctattgttcccatctttatgtctatgagtacccattgtttatcccccacttataagtgaaaacatatagtatttggttttctgtttctgcattaattcacttgggaacatggcctccagccgcatccatgttgctgcaaaggacatgatattgttcctttttgtagctgcatactagtccgtggtgtgtatgcatcacattttctttatccaatacattgttggtgggcacctagattgattccatgtatttgctattgtgaatagggcagcaatgaatatttgagtgcatgtgtctttttggtagaattatgtattttctttggagtatatatccagtagagggattgctgggttgaatggtacttaccaagttctttgagaaatctcctgactgctttccatcatggctaaactattttacattcccaccaacagtgtataagcattcccttttctccatagccttaccaacttctattgttttttgacttcataataatagccattctgactggtgtgagatagcatctcattgtggttttgatttgcctttctctgatgattagtgatgttgagcattttttttcatgtttgttggccaaatttgtgtgtcttcttttgagaagtgtttgattgttttctcttcccactttttaatggggttgtttcatgctggttgaattatttatgttccttatagattcgggatattagacctttgttagatgcatagtttgtgaatattttctcctattctgtaggttgtctgtttactctgttggtagttgctttcgttgtgtagaagctctttggattaattaggttccacttgtcaatttttgtttttgttgcaattgcttttgaggacttaaacataaattctttcccaaggctgatgtccagaatgatgtttcctagattttctttcagggttcttatggattgaggtcttacatttaaatctttctttaatccatcttgagttgatttttgtatatgggaaaggtagaggcccagtttcatagttctgcatatggctagccagctatctcagcactatttattgactaggaagtcctttccccattgcttgttttcgttgactgtgttgaagatcagatggctgtaggtgtacgactttatttctgggttctatattctgttctgttggtctatgtgtctatttttgtacaagtaccgtgctgttttggttactgtagatttatagtatagtttgaagtcaggtaatgtgatgcccctggcttcattaattttgcttagggttgctttggttattcaggctcttttttggtttcatataaatattagaatagttttttctaattctgtgagaaataacattggtggtttgaaatggatatcactgaatctatcgattgctttgggcagtatggcctttttaacaatattgatttttccaatccatgagcatggaattttttcccacttatgtgtgtcatctctggtttctttcaaaagtggtttgtagttctccttgtgtagatctttcatcttcttggttagatgtactcctagctattttattttttgtggctattgttaatgggattacattcttgattgggctctcagcttgaatgttattggtgtatagaaatgcttctaattttgtgcattgattttgtatcctggaactttgctgaagtcatttatcagtttcaggagccttttggtggagtctttagtgttttctaggtatagaatcatatcatcagtgaagagagatgatttgacttcttttcctatttaaatgccttttatttctttgtcttgcctgttgctctgggtaggacttccagtaccatgttgaataggagtagtgagagtaggtgtccttgtcttgtttcagtttccaagagaaatgctttcatcttttgtccattcagtatgatgttggctgtgggttgtcatatatggctcttattattttgaggtaaattcctttgatgcctagcttgttgagggttttaatcatgaagggatgttggattttatcaaaggctttttctgcgtcaattgagattatcatacgatttttaattctgtttatgtggtaaatctaatagttatctttggatggtgatttttatattcttctttggcctttatattttctagaataaatatacagaaaataatacttcttaaataaaggaaaagtacttaaaatatccttttaatggcatttcagtatacttttattttgaagcttaaagcatcaatatatttgtcacactcaagtggtggctaaagcattttttaaaacaatttctttaattatttatttaagtgaaattcatcccaacaagaatggctctcaaaagaaagaaaaatgaatactttgtcatttagaaatattttattttcctgtaacgatgcagtcagaataactattttggtctttttgttcaatctgacagctcaacatttcttgggtatacatgtgtaatccataggtagtgaatttggaagaagtaaagagatgaaaagggactttctgcttgggcagttgccctttgaattgctagtatacctgtgatgagaagggaaatatctttttctttttttgagacggagtctcacactgtcctgcaggctgagtggtatgatctcagctgactacaacctccgcctcccaggttcaagcgattctcctgcctcagcctcccaagtagctgggactacaggcacatgccaccacgcccagctaatttttgtatttttagtagagacaaggtttcaccatgttggccaggatagtctcgatctcttgacctcgtgatccacctgcctctgcctcccaaaatgctgggattacagatgtgaaccactgcacccggctgggaaatgtcttttatagaaagaagctacttggaagagaaagagagagatagagggatctctgttgttagaaggaaagctctatgacaacatgttttcagactagagatgaaaaaattactttccaaaaagctgaactgagattacaaaatgataggggtgtgactctcagagcatcctgggcaatgtgataagcaaggaagcatggcaagtgtgtggcagagaactcagcagaacccgaactggtcattctccccacggccatgtgactctgagaagacgcctgagacatatcccgggaatggaaagtagagagagaaagagaaagccaagccttgagaagtctctttctctctctctctctctctctctctctctctctgtgtgtgtgtgtgtaaaaatggcatatgaaaaaagccagaaatacgtaatttgatttggtatgctaatcaagttgtgatccttaatgaaaagagttatggcttctccatcagtcaacccagtgaaagattaaatactgcagatgagaggttagaggataatggcacagtgaccacaggagtaagggagatactacaaccatggaaaatgagggttgtctttcataccataccagattaaacgtcctaatgcacagctctaatcagattataatactccctcctcagaaacctttcatgcctcccatcccaccacaccccagggcctattgaaggaagctcagatttcctggcctggcatacaaagtgtttcaaggtctggcatcaacctcctttaaaactttacctcccagtgctctctttcacactgtgtgtgctgcagccaaacaggattctacactggacacatcctggcttccccacttttctactttgtacacactgttttctctacctggaaggctcttcttcattgttgtgtaaccacattcagctatccgtgaaagctccatctcatgtgtcattagtataaaaagcttcacttggttccttcctgggctgcaaataatttctcccattctcattccctcatttgtacttctcctagtgctattttagttcaatctaaccagcattaattgatcatgtagcatgtataaggcactgtacttggccgggtgtggtggctcatgcctgtgatcccagcactttgggaggctgaggcaggtggattacctgaggtcaggagttcgagaccaacctggccaacatggtgaaaccatatctctactaaagatacaaaaattcgccagacatggtggcaagcgcctgtagtcccagctatttgggaggctgaggcaggagaatcacttgaacctgggaggtggaggctgcagtgagctgagatcatgccactgcactccagcctgggtgacagagtgagactccatctcaaaaaaaaaaaaaaaaaaaaaaaaagacactctactctagaaatacaactgcacacatacacaaacacacacaaataaatttcatgtcctcaagaagcaattagtgtaaatgggaaataagaagctaaataatagttcattatgaatttgtgtgaaaaaaataaagaagagaagcatattctaaatccaccaatgtcccaaagaaatgattagatcatccagttggtcatttggaagtcctgtcattcccttaacccacacatccagcctactggcaagcctgtaaactgcatttccaaaacatatcgtgaattggtccccttttctccatttccactactgccaccatctcttgccctatcagtctccctaatagtctctgcttgcagtcctgccttcctgcaaccattctccacagaaaagtcagggagagctttctaaaacgttaatcaaatcatatcttcttactgcttataacttactccaatgatttccaactattcgtaaaaccagcagctctttccatggcctacaaagtcttgcatgatccaacatccgcttccctcaccagcttcattctccatctctctcatgccctccactacttttcaccctcattgatctcatttccattcttagatatgccaaacttgtctaatcttggcatttttcatcatcttttcctctagcctggaacattctgcccgtggatctcctcatggctcttctcattttccgttattaacaatgaagatgtatgctctcctctgattgcttaaataccacttctctgaccgtcctacttcaagaaaacacccacaccctactaccctctattacgtccctgtgtgtgtgtgtgtgtgttcttcgtagaaattttgaaattggaaattatcttgtttagtaatttacccgctgcctgtcacccccactacaaaacagggaattgtttatttcacatctgcctatcaactaagtttatcatattccctggcatcttgtaggcacacaataagtatttttgaatagtattaatcacagctttcatctatgtaataccaaatgtgtgtcaggcactgttctagcactttacatatattaacttatttaatctttacaataatcctataagatggatactaatattatctctttttacagataagaaaataaaggtattgagaggctaagtaacctaaagttaaataactcttaaatgtcagaactaggatgcaaactcagagtatgactccagtgcccttgctcttaatccctgtataatactacttctgcaaatgaaattaatgttgaactctgcttgtatggaagggaaaatcactcagaggaaaaaaaacgctacagtgaaatttaggacaaccaagagtttgccagagaataaaggcacaagaggcattccaagctgagggaagagtgtatacaaaagcatgcatttatccttttctgccttttgcaatagtcatttgtgcatatcttcttttttgcaattgtatataccttaaatttaaatagtatttatttatgtacctgcatgccctgagtggtgcatatacattagttttcgacatctttttctggaaagagctatgaacacaaatccagggggaaaatgtgttcttaccccattctagaatttcaagtctctatgacctcgtaaatgctctctgagccttagtttcctcaccagtagaatgcgaaagataacccttcgtatcaggattctgggtgccgtcaaagaaattatgatatgaaaggcaggtgcatctataaagcacaaaagaaacattcatgttctcatctgcatacagcttaatttagcttagtaattccttatttttcctcacaccttaaagtccaggtctttcaaaactggattttctttcttgactcagctgacttaatggggctagatgactcctttgggttgttcagtaaagctttattttgatgagactcaattctttactaatcctactaccttccatagtgtataactgagatattgattggaattgcattaatctgtgaatcaatttgaggacaaatgacatcttaatattaaatctttcaatccatgaacatgctatattcttccattaaattaagtttttaaaaattctcccagttgtgattattctgtttgtagaggtcctgtacatcttttctaagcatttaatgatttttgatgctatcgcctataatatcacttcttaagtttattttctagttggtttttgctgctatgtagaaatacaatttatttttatatattgactttatagccaacattcttttaaaacattaattctaagaacttatttgtataatattttgtattttctacatacacaattatgtcatctgcaaataatgataatattatttcttcctttctaaacattataccttttatttttcttgccttattccattgcccaagcacccccaatacaatgctgaaaagtagtaatagagggcatccatgtgtcattgtacatttcagagggaactttttcaagattttatcatatgttatcatactttctgtaggttttttgtagatgcgtcttctcagtttaaggaagttccctcctgtcttagtcttttcaggctgccatttaaaaaatgctacagactgggtgtcttaaacaacagaaattaattttctcataattctgaagcctggaagtctgagatcagggtgccagcatggtcaggttctgagaagggttttcttcctggttttcagactgccgtcttctcactgtgtcctcacatggcctttccatgatgtgtgtatgtggagaaaaagagagcaagctctctggtatctcttctttaaaggggactattgccaccctgaaagccctacccttatgacctcatttaacccttattaccttccgaagacctaatctccaaataccatcacgttgggggataggactccaacatatgaatttcagagggacacaaacattccatccataacaccgcttatttctggtttgctgaaaatgtttaacatgagtgggtgttgaattttatccactgctatttctggacctattaaaattaccacatgatttttctcccaattatttcactaatgtgatgatttaaaagaaataattttcaaatattaaaccagccttgcgttactgaaataagctcagcctggtcataatatattacctttgtaagcattcctagatttggtctgctaatattttgcttggaatttttgtatctatgttcccgagaaaaagaggaaagaaataaacaaggaaagggagagagagagagagagagagagagagagagagagagagagagaaagtgctctataattttattttttataatattcatattaagttttgatatcaaggcttcatgtaatgtcttagaaagttttccctcttttctgttgttttaggaggattttgtgtaatttggggtttatttcttcctcaaaaatttgatagaatttgttgatgaagccatctaggcctggtgtttaaaactatagatccagtctctttaataaatgtagtactatttagattttttaaatttcctcttggttagttatacttttctaagactgtattctttatctgattttgtattggcataatactgtttataatcttttaatttgtcagttttacatctgtaagatctgtagtattgtcctgctattgagtaggtataccttctctctcccttttctctcttttaaatcaatcttactttctatagatttaattttctttttcttttctaacttcttgaggtagatgcttaaatacttatttttaatctttattctcatctaatattttaatctttattctcatctaatatatatatcaatttccctcaaagcatagttttagttgaatccacaacttttgatatgtagcatttttattatccttcaattcaaatattttctaatttccagagtgatttcttccttgacccccccccccgcacatttagtagtttattgtttaactcctaaattttgtgaattttttagccttgttattgttattgacatctagtatatatccagtgtagtcagagacaatgctttgaatttttttgtttttttgctttatactttactatacatcaattggaacaaatgttccatgttcacttgaaaagaaagtagtttgggggtgaaatgttcagtttgttaattgtatttaaatcttctgttcatattttttgtctgcttgttctatcagttactgagacaggtatgttgaattattccaccatgattgcaaatttgtctatatcttcttttaattttgtcaattgttactttatatatttttcatgctatgtcatcaggtgcatacaaagtcagaattttaaatcttttggtgagttgaaacttttattattataaaattcataagcatgttgatatcttatttcttggtcatgtttgtgaatggcttcctttttttgggggggcgggggtgggggacagagtcttgctctgtcacccaggctggagaaaatggcttcattttaaaaagatattctcactgagtataaaattctaggttgacagcaaagttctttcagtgtcttaaaaacataattactctgtgtgctggctttcattttttcttttgagaaaacagctatcttatttttgcctcttaaggtaatatggtttttttctttctgcttttaagatttttctccctcaattggttttcagttctttcactattatgtgctttggggtggttgtgatatgatttggatggtttgtcccctccaaatctcgtgttgaaatgtgacctccaatattggaggtgtacctagtgggaggtgtttgggtcatggggacagatccctcataaatggcttggtgctgtctttgcagcaatgatcaagttctcactctacaggttcacacaagggccagtcgtttaaaagggcctaccatatttttcttgtccctgctcttgccatgtgctgtcctggctccccctttatcttatgccatgattagaagcttcttgagccctcattagatgcagattccagtgtcatacttcctgaacagcctgcagaaccatgatccaagataaacctcttttatttaaaaattacccagcctgaggtttttctttagagcaatgcgaaaacagcctaactcaggttgtctttgtagttattctatgtagtgtttaccatgcttgtttaaaatgtggcttgatatcttttaatagtttagaaagttctcagtcattatcttttcaaatattgccactttcctagttcatctctactctctgttctacgaatgtatctgatataccttttatgcttcttttctatattttccattcttttgtctctccatgcttatctgatgttttttcttgagctgtcttccacttcataaattctttcttaaactgtgtctaatgtgctattaaacccaattattatatttttatttctaatttttctatttttgagatggagtttcactcttgttccccaggctggagtacaatggcacaatcttggctcactgcaacctccgcctcctgggttcaagcaattctcctgcctcagcctcccgagtagctgggattacaagcctgtgccaccacacccagctaattttgtatttttagtagagatggggtttctacatgttgatcaggctggtctcgaattcccgacctgaggtgatctgcctgtatcggccttccaaagtgctgggattacaggcgtgagccaccacgcccagccttctaaaatttttatttgattttcttgtatagttttcaatttcctattaaaatgcttcatcctgccttttaatttcttggacatatggaacataattatttttaaacttatgtctgataacttcattttccatatctccagtatatttatttctagtatctactttttgtcgtgtcatatcttctcatctctctcattaatattttaaagatattttgaagcttctgataacattatctttctttagtgacaagttacaattgtttctggcaaaaatttaggctatgaccacccctgatctcgtgtcaccttgaaatgtgatgaactaggaaataaatttgttcaaagcttggctttaatccctgtaacctagttctgggttaattttactctaataacacagactttctggttcacaaaccaatttgggttattatcaaggtcttgcctccttggtgggctctgagagtcctgaaagctttgcacaacttcttggcctgtttgcaatgcttttagaattggcaaacaccttgaaggggagagccaaacaaatgttggactcagttctctaggtttcttctttccctagatattggacccacaaatcttcactttcttgagggcttcttaaatgttttttctggattcaaaaagtatattttgtcctgtttaaccagtcattctcagcaggaaaattgatcctaaacagcttagattgccatttcaggcagtgtaaattcccatcatctcttgccaattttattacaatagacttaactattcttcctgcttccaccccaacccacttctgtctattcacacaacagtcaaggtgactcttttgaacatctgtcatatcatgccattttttccgttctaaatcctctgatggtttcttatctcactaaaagaaaagcttaaaaaaaactctttacttacaaggctttgcatgacttaccttctctcagggaacacactcatcagaagaaagctggtaagacaaaatagaatttcaactaaaagcattattaatgatagattggcattccacataataataaaaagagcaaacccttgaaaagatataacaataatgaactgttatgtacccagcatcacagctttaaaatgttccaaacaaaaaatgacaaattacaagtaaaaattggcaagtgtacatttttagagtgatattctgagacatttcttttagaaatgtatgggtcaagcagacaaaacattaacagcattataaaagatttgaatgccaaaataataaattttatctaggacacataggtttcttctttccctggatattggacccacaaaccttcactttcttgagggcttcttaaatgttttttaaaaacattaaaaaataagatagctgctttctcaaaagaaaaaatgaaagccagcacacaaaggaatagcagattagacacagattaggcacaacatcctgtaaataaaataatgtccaagggcatggaacatttatgaaagttgtctatttactaggtcacaaagcaaatatcaaaaaatgtcatcaaatagatatgttacatgtctccaacccataatgcaattgttagaaatgaacaacaaaaacacttttacaaagtgtacattaaaagactttaaaatataaccataaatatttttgatttaaggcataaatctcttgtaaatataaaaatattttgaagctaaaatttctgaaaatacaagagttgagagatcaagaagctggaaaaaacagtaaattcaatgaagttacaacaaaagaaaaacctgtaataatgctaattagcttgattgtggtaataatttcacaatgtatacatatactaaatcatcatatgtacaccttaaatgtatacggtttttatttgtcagctataccctaataaaacagaggaataaaaagaaatacaagtaatagaacagatatcaatgaaataaaaacaaaaacactagtgagaattgacagaacctggtttttagcaggagaggtggagggagagtgagagagagagagacagagaggggggaaggagcacaagcacatattcaggcacaaataacattaggaataaaaaggaatcaattaaatattatggtagaggtttttttttgttttatgttttttgttttttgttttttttgagacagggtctcgctctgtcaccaggctacagtgcagtggcatgatcttggctcactgcagtgagcctccccagtttaagcaattctcctgcctcagcctcctgagtagctgggattacaggcgcaggccgacaggcctggctaatttttttgtatttttagtagagacggggtttcaccatgttggacaggatggtcttgatctcctgacctcgttatccgcctgcctcggcctcccaaagtgcggggattacaggcatgagccaccatgaccgaccaagattattaaaaaataataaatactatactactgttttccataatggttgtcctagtttacatttccaccggcagtgtagaagtgttccctattcactgcatccacaccaacatctattatgttttgattttttgttatggccattctcgagggagtaaggtggtatcacattgtggtattgatttgcatttccctgatcattagtaatgttgagcattttttcgcatgtttgttggccatttgtatatcttctttcaagaactgtctattcatgtccttagcccactttttgatgggattgcttgttttcttcttgctaatttgtttgagtttttttgtagattctgggtattagtcctttattggatgtatatattgtaaagattttctctcactctatgggtcgtctgtttacactgctgactgttccttttgccatgcagaaactctttagtttaattaagtcccagctatttatttttgtttttattgcatttgcttttgggttcatggtcatgaaatccttgcctaagccaatgtctagaaaggtttttccaatgttattttctataatttttatagtttcaggtcttcgatttaagtccttgctccatcttgggttgagttttgtataaggtgagagatgaggatccagtttcattcttctacatgtggcttgccaattatcccagcaccatttgttgaatagtgtgtcctttccccattttatgattttgtttgctttaaagattggttgggtaaacatttgggtttatttctgggctttctattctgttccattggtctatgtgcctgtttttataacagtaccatgctgttttggtgactatggccttatagtatagtttgaaatcagggaatgtgatgccatcagatttgttctttttgtttagtcttgctttggctctgtgggctcttttttggtttcatatgaatttcaggattattttttctagttctgtgaagaatgatggtggtattttgatgggaattgggaaaacagtatggagattccctaaagaactaaaagaaggactaccatttgattcaggagtcccactactgtgtatctacccagaggaaaagaagtcattacatgaaaaagacacttgcacatgcatgtttatagcagcacaatttgcaattgcaaaaatgcagaaccagcccaaatgcccatcaatcaatgggtggataaagaaactgtggtatatatacatgatggaatactactcagtcataaaaatgaatgaattaatggcatttctagctacctggatgggattggagattattattctaagtgaaggaactcaggattgaaaaaccaaacatcacatcttctcactaataagtgggaagtaaactacgaggatgcaaatgcataagaatgataagatggactttggggacttagggggaaacggtgggaagggagcgagggataaaagactataaattgagttcagcatatactattcaggtgacgtgtgcaccaacatctcacaaatcaccaccaaagaacttactcatgtaaccaaataccacctgtttcccaaaaacctatgggaataaaataaataaataaaataaagatggagagaaaatagaaagaaaaaataataaataaaataaattacttaggctgattttattgaaaacttagatgaagtgaacatttttctagaaaaatataaatttctggattgactcatgaagcaatagaaactcttaataaattaataaccattaaaaatacaatagctacagttaatataaaggattagtaaccattatagccaggtgtggtggctcttttctgtaatcccagcactttggaagtctaagatgggaggattacttgaggccagaagttggagtccagcctggacaacacagagaggcctcatgtctaaaatacatatatatatatatatatatatatatatatatagagagagagagagagagagagagagagagagagagactatttacatatatatatttatatatgtaatagtattaaatatttatttatattaaatattacatttataaatgtaaatagtattaaatattacatattaaatatgtaaatagtatagtaaatatatgtaaaatgtaaatatttacacatatataaaatacatatatatatgtatacatctatctatatatatatatatatagagagagagagagagagagagagagagagactatttacagaggattaaccactagagggaatgaaaaagaattctataaagaatgctgtagggctaagggagagtgcccaaggaaataacaaacttaaaaggtggttgggaggggggacttccccagacctcactggaaaagttgtagttgcactggatggaaaacaagattgcagagttgatcctggtcaaagctggttcccagatggcaagcccaaagctatccttaagctttcagggtagagtgttcatggacctctctgggaagcttgccatagcaggtctcctgaactctctgggaagttagttagagtgactgtggaacttatcaggaacatccccactgggacagctgctgcacttgctggaagccaccctcacagcaggagggtgtctaaaattttggggggctgagctccactaggtgtacaagagtacacccactgagcaccacaagagtaagaaggaagaaaaacatcctggaacaagaaaagaagtttgccacattatttatattaccaaaaagttgaaaatatgtatattaacagttaaatataaagttaaaatgaattcatcctacatgtatcgacataaatatatcacaaaatgtagttttcagtgaaaatttgcagaagttttgtacaatattatgcaatgtataataacttttaaggcatgcaatactatatacatgtattctgtgatagtatgtgtgggaatgtagcaaatttagaatgttgatggcctttgaaaagagtaagaggagaatggaagtgggaaaaagtatagagggacatttaattaaatgtaatattttattaatttataataattacttgtttaatgtttctcataatcactgcactggtcaaaagctttgtttttcttgttcactcctgttataatcattaatgtaataaatcatttttattacagtaataaaataatttttattacagtaataaaatatgacattaatgtaataaaatcatttattacagtaataaaataattaattttattacttcttaaaagatattataaaaatgggaaatattgattgagttgagtagtgagtacttaaatgtttgataatattaccctttataaattgactggtcacaatatattctgaagggcagattttaaaatctgttcagcccaaaattttccaaacttttctgaccccaaattttcttttcaacaaaatactcattgatattttactgaaccctattccatatagcacagattagagaaatgaagatttgctcaaatgaaacaggttatacataattcaatcagtaaatttatgagaaggaattagtctattaaagaaatcattccagctgagtctgatttgttaaatgataaacatagttctcccaatgtttgattttcaagtcatactttatcaagccgtttgtgataccttagctcaagccttgatttttcaactgaagaatcatttgcagtagaaaatattacaaaagaaaagtgttgtgacctatatgtccatccaatcccaccaattttcctgattctacacaagctcaatcagctgtaacaccctttaattatccactaaaatagtcgttttccagttcaaagcattcaaaacctacaaaagcttatgttttgggcagtgattgacaatactcctttggaggtggggaccagagaaatgcagctaattcttcactatttcttcttatggatgtctttgtaatagaaaaacataaactcagattttgtaaatatcacttgtctagtcaggatgcttgattcttaagtaaatcaaggaattcataaaagcaatttaaataaaaatataccatcaaatcactggctggtaccatttggtgtaatttgctgacctcaatatttgtcagtttttctacaaacacataaattttagtgcaatcttaatttgtaaaattgtaagaaaaccttgccaggggtgactacttcaagaattgaaaattggcactacatttaagcattgaaaagaattatctgttctccctttaagatctgtctttccataaacagggttaactctctttttctggtgtcacaaaaatgttcatttatttatttatttatttatttatttatttatttatttatttattcaacaaagttttctttttatttaatgtgccagatgttgaatagctttaagccaatattggtcaactgagctcctttaataaaaaatgaccaatgaggcaatagaagctgtatgactttagaacggcaagtccttttattcaatgaatatttattgagcacctactatgttcctgacatagttctgggcattaatgattataacaggagtgaacaagaaaaacaaagcttttgagtgcagtgattatgagaagcattaaacaagtaattattataaagcacaatgagtatgactataggagaaatacaacttgatctttcagaagctaactggcttttatttattttaaaattatgttttagcacctaatatttgctaggcattgttctaggaattggagtacagcaagaaaatcatcaaagtacctgttctcacagagcttgcgttctcatggcagtcaaatctgcagcagtagtttttatcagcaccatgcacaaaaccagtattttccaaagagtgatacttttactgcccatagaacatgagataatgtaggtggttatataataataatagttatatacttatatttataattattttttattcatagcttgtgatacaggctttctgtttgtggtagtatatctaatgatgcctttctaactgaatttatttaatttttttaaagctgagttcaacgaaaagttatttagtaagaatagggtgtatatcaatttggcaaaaaaaaaaaaagttatggtgatgcacatattaccaaaaattgggaaacacaaaataagatgttatctggttgccaaaggtattattccatcacccaaattctcaatataaactttttattattttaaagtgttaatagatatatgacataaactcaattttgcggcggtggggggtggggcgggtaagaaagaagacagatttaaaacattctttactcctgtcttttgtaaactgcttgaaagtggggaaagtcttatttatagttctcaacatacctgtgcttagtaggcactaaataaatgctgcataaaggaatgaaagaactaattaatgaaatgagaaatgctcttttgtaccattcaaactatagtgaatactctggactgactgaatgtaattacccatagggtatgagagggaagagtctctgtgaaccaatccatctacaagaacaatttagggctctgccccgaagattcagatctgcctttctaataaaaggaacataaaagagattaacctttatgctgtgtaactgcagaccaattggtacagcttgccttatatcactgccatagaagcacagtgataatgaaatactcttaccaaattgtatgtatttttcagaagcctgtctaaattaagatcccattaaataatatattaccatcagtggggtctcagtattacgctaacaattgaaagagaacccatggaaattgcaaatcatagagagttctcattgaacctatagaaagtaaaaaaaaaaaaaaaaaaaaaaaaaggtagggtgaaagcaactttaaaaaatggcatcctgataattttgtgtaggggaaaaatactaaaatgctaaaatattgttactttccacattttctgcagctttagaataaagttttatttctcttatttcaaaatgttaattcctgtcattttcgactactgaggaaactattttctatgttgagactttgaagaattaaaagattgctaacttttttgctaatagaagaatcttaagaaacagtttaatttcaaagaactcaagattcacttacaacaagtagctcctacttttgtttttgctgcgacaattttaaagaataactctacagaaggcaatctctcactgccatatgagttcaactaggaattattctcttttcctttccaaactgtgattgtcacacagttagcaacacacaaataaagttaatattctggtcctgttgatatcattctcagattttcttgtcacgtgtcatcagaaatattggcattcggcaggttggtacatgcccactgccaagtcctcttactgcatcagacaaacttcataagccttcctgaacctatttggtagaaacaggatcaagacatctccgtttgaaactaaattctcccagcagctacacctcaagcagtggacatctatttgctttctccttttccaggccgtggtatgagtcaagtaggataggacaaaggtgacctgctgagttatcaaacttgctattctccaagaaacacacatatggtttgctcaatttgaacaactgcctgggaacaggattcagttcccgatcctgcctaagttcattgtaaatagtttgacagggggaaaaatggctttcttcttcttgctaatgcatctttgatatgtactacatctagatccacttacaagtagttgctatgtcagtcctttgacttccctggcaaatcaatcaaaggatctaccatttatctgcaaaaaaaaaaattaagaaaaatgatttattggtgctgagcctacacttccatgatcaaagaccctctatgagcatgcattttgtaaagcaaaactgtggtaaatacagcacagagagtgtgctttccagtgaccaggtaagcaaggattatttattcatttatttatttgcatatttacacttacatttttgtgtgggagcatgtcaagtcagagattagaaggcaattttcacataaaagctccaaagaaacatgttgttattctgtggaagttatttgattgttcctcatagtcttttcgtttcaattggcatttagagaactagccacacaggctgctccccatcttcctgcatgataccatttcttcctgttctccttatctatagctgtgatgatgcacagctttctcttttttctttcttgtgggtttgtgcagtttcttgatgtttgtgacaggccacgataggggaagcttttatcaccgtggggtttggaggcctcagtaaattgaaaattgcaaatgaaatccactgggcttgaattcatcagctattatgtcagatgacctttggcagctgctgataaaaatgagagaatgttagctctgatccaattttcagcactaaccattccttttcaaatccattcacagtcaggcagcagacacatgggaagtgaaaatgatagggtttcaagagaacggcattgtgttgcagattaagattttctccccctatttctagaggtcagcccccaggcccctgtctggtatctacctattgtccaatcagtttcaatatctgcttcagaggacatgttagccatccttacagataagtgcttacaggagagaatgttggacttaatagttttgcttaggaggcatcaagggtcgcagtgtagcaatattgactggcacatgttagtttaatctgacataccaaggaatgtgacactagattctttcagagttgttgatctctaggtgatttttgttaccagctctggttttatgaaatttatttttgcacaactatttatattcatgagtcagagatattctaaaatatctatcatagccaagcaaaggcagcctaagcttgtctaaaaaaaatatatggatgccaaaattatgaaactgggaaaaaatgagttgtgcgtattctgttcttgcaatccagctaaaggtcaatgtcattgatagtattttaggagctagattatcctgaaataaatatgtgtctatcgactggtaggcttctcaataaatgtaatagatttttatcatgcagagaaaaataattagccttgttactttccgctgaggtagcatgaaccagcaaaataatgctatatatggttgagtcatcagtatgatttcccatctatgaaacacaggagcaatctgaaaataaagaaaactgaaattaattttttctccacagttttctgtgttcagaaaagaaaaaaaaatctcctttgatcctttgaaaatgttgagttcattgagggaatagtctcaagcaaatgcaaagttgagaaacaccaaataattgaaaaccatgtgtcattataagcattcacccaaaaatatgataaactgaaaaatattaaatctgcatttctctaggttttcctggtatgcatatttcttcatttttttctcttgacattggttaacattatatgaaaataattgttcatatatgactagggttgcaaaaatgctttttatggcttagcaattcctttctgatacaccaacccatagcattatggagctctaaaaatgcttagatggccgggcgccgtggctcatgcctgtaataccagcactttgggaggctgaggtgggcggatcacctgaggtcgggagttcgagaccagcctgaccaacatggagaaaccccatctctactaaaaatacaaaattatctaggcgtggtggcacatgcctgtaatcccagctactcgggaggctaaagcaggagaatcgcttgtacccaggaggcagaggttgtggtgagctgatatcgtgccattgcactccagccagcttgggcaacaagagcaaaactctgtcttaaaaaaaaaaaaagtttagatgactcttctaaatgccagtctttggaaagaaaaaatacggttctataagcttccttcataagaaaaacaatataacaaatatatatatgtaagttatccatatgttacatcttacttttaaaaactaacttaaagttagtatcccactgtttgccttactaccttttgttgatattcacaagttcttttaagagaggacaattatctgttgtccagtgagcatgtataaataaaatgcttaatgatagtatcaaaaaaaataccatatgcacatttttttggagatagggtctcactttgtctcccaggctggaatgcaatgatgcaaacacagcttattgcagcctcagcctcccaggctcaggcaatcctttcacctcagcctcctgagtagctgggactacaggcatacaccgctatgccggctaagttttgtactttttgtagagatgggatctcggcatgttgcccaggcttgtttcaaacttatgaacgcatgcaatttgccctccttggcctcccaaagtgctgggattacaggcgtgcaccatcataccggcctccgtatgcacattaaaagtctgtttttattgagtaatattttaaaagactcaagctataagcaataactgggtctaaaattaacagaggatccaaccaatcaaaaaatatggatccaacatattccatgatttccccaaataattggattttctgctttttttttttttaaccaatgaagggacaccttttagagtcccatatatttctttttcttttttttttagtctatattttccaatttattttaaagaatggaaactatgctgataagtttcactttacctaaatttacgagtacatccatgaattgcaccacaattaggacaatttgattatcttaatgattctgtcatgaaacttgcacactgtatccaaaggtaaagaccagcggatggagcctcccacaagttctgtgcacaaggactttcttcttgggagttaaggtatctgagaaagtagttctcctcccagattaagtcctcaaaaatccatagatttcttaagcctcgttatatggtttcctggccctatttgtacctcaaggaaaatgagacctttgcctggctgtctgtaaaaacaccactacaactttaggaggctgagccaaacctcccctctaacagaacaaacagaagctcttatcaaaatgatgaagtttgcacttcacaagtttatcaatgattgtggccacacattgctcagttcatccatattcaagaacaggacgtgtttcttagagtttagttcctcaagtgtctaactaccttttaggcttgcagtggatgctgtcactatttccaaagaagtaaataatttaataatgaacatgctcttagtgaactgcaactgtgacagccccaagtcattcagcatggacccattcagacaacaggttcctgccagaagaagcagcagcacccacatttggctgtgccctagggcctggctttcagccactgcgatctgcatgctcagatagatgaagcaattagataagcctgttaagttttatgtcttcattattgatttatagtatgaaatcagcatgattattgaaccagacctgccactgaaacaattgagtcattgatccttacataggcatgtatttccaatttagatttggggaggaaatacgtggatatattattatttctgatgttttatctaagggcttggacagaaatttagataattcattatttccacctcctgacctttcttcattcccactcctgtagcaccccttccaatagatgtttctattatgataaaaatgttctactctgtgccgctcaatatcatagcctgtagccacaagtggctataaagcatttgaaaggtgactagtgtgaccgaggaactgaattttttattttgtttaattttaaccagtttaagtttaaatttaaatagctacatgtggctggcggctaccatattggacagcccagtagctctgtattatactaaacttttctagtccctgcaacgatagcacttgtcaaaattctaattacttttcaagaccctgtttacatactacctcttttacaaaactttgcttacttctatcacttcaacattacctttgtctaaatacatatcatttgaaaaccagggatcattttctgccttgtattatcgttatctgctccgctataccacaaattgctagaggacaaggactatgtccacctagtgatgtgctgtgtcaataacaaatatttgaggaattaaaatgagttgtaggttttgcagagagaaggactattattttgttgttgttgttttagtacatgctaattagagaagcaataacactatcatccttttcacaccctcttttaaaaaataatttaggaaaaattcagttatttttctctcctcatttattgttatcactgagatggaaatttcaagcaaaattattatgttttcttcttttgaagtcaggaaacttgaagacacttttcatcttcatagagaataacacaatgcttacatgtagaaagaactcagtaaatacttcttgagtgaataaatcaatgaataagaattattatccaatgaacagtcatatgtatgtgtctttatgatgaatgatttatatttctctggatactggaaaaagaaaatgcagtagatatacaccatggaatactatgcaaccataaaaaagaataagatcgaagtataataattttaaaaaaagaaaaaataaaagtaccaaaagaatggaaaaaaaaagaacaggatcatgtcttttgcaggaacatggatggagctggaggtcattatccttagcaaactaaaacaggaacagaaaaccaaataccatatgttcttacttataaacaggagttaaataatgagaactcatgaacacaaggaaacaacacactggggtgtacttgagggtgagggtggcaggagggagaagagcagaaaaaaagtaactattgggtggtaggcttaatatctgggtgattaaataatcttgacaaacaaaccccatgacacgagtttacctatataatataacaaaccttcacatggtcccccaaacctaaaataaaagcttttttataaaggattattattcaggtttctgagtagttttaaatccctgaatcaagatgtgcttatattgacttctaatgttagaaaaattccttccagaatattcacaggaaactctgcttgaggctttgggaggctaaggtgggattgcccaggagtttgaggctgtggtgacctattattagaccactgaactacagcctgggtgacagagtcagaccctgtctcttaaaaaaaaaaatactcaaaagtaaactaagagaatgaattttacagtttatgaatcttaaaaggtgaataaaaataccatgtacattagtgtatgtttatgatatttaagtagtggtttagcattttagcactaaattgttgatattgatataagacataatactaactttattctgtggggtcgtatgacacctaactgactttgggagaatagtaaggtagtctgagacagctgtgctatgattgaaagaacactggatttggagttagaaaaccttgttttgaaaccaaattcttttacttactaattcggagtaataatttttattaccacaatatattataacatacttattgaatgcatattatgccccagaactgttctccggacactatatgagttaacttatttaatcctccagcaaccccataaagtcagtattattatttccattttacagctgatgaaactgaggcacagatagattaagtaacttgcccaaggtcacacagcaattacagtggcacctggccatagtaggttcttcatactttttggaatattagcatggtgtagattcaggtttaagcagaacatactggctcttgtcttaccatctctgattgtattctcttcaataaaaggaagataatactattttcctcccatgtcacaggaaaggctgctatgagggtcaaatgagataataatatgaaaatgcgattacccatttactaattgtacttagtagttgtgcctggtgtcttacattaagtttgatgtgcctttttgtgagtaggaaagccataaatcccaaatatgcctcatttgctgacaagaggtcctcctcactcccattttaatagtcaattagtcatgaccacaataaaataaatccagggaaagggatccatcagtacttcagcctcccaacacctggttatacagtaaagccctttgggccatttttgcctttgtgagaaatctgggaaagaatagatgagaagggaaggaactggtggattgaaggaagagtagaatcccccagaggtcactgtgaagaaaagtaatttaattcaaccaagagcgaccaaccatcccatccattcacctcagctgggtactgtgagagtcacaaaatgctagccactaaatgggtccttagtgtaaaacctttaaaaaaaataacagaatacttgatatcagaacactttgaaattatttctcattcccagaaatatatacgtggaatatgtggggctttttaaatgaggttaaattgttctacttcatactactttaggcctcttatacctactcatttgtctgtgaataatttgcaatacttcaacggaatcgcatgtccatgcacttaagtttgttagtctataaatactcaaaattatgtccaaacagatttatgactatagatcaaacattactaatcagtaccttccacctacatattgtattaatttctttttcataaaagcaagcatgcagatgaataagaaccagtggctttaagaagtacaggttaggtggagaccttaaagaaatggaactgattataataaaatataaaatactgtactttatcattcttatgaacacagcctcctgaggacatacaatgccttttttaatgaggtaagggtgagtcacagctggaaaaaaaaaatgaggtaaggagagaaggttttcagagtgaaggaaattgttttaatccatccgaccaattaatattaagtatgattcaagtctaaagctgacattggccatcgctttttattgtgaataataataataatgttgatagcttctattgctgaagtatttaccatgagcaaatgcattgcacagtaaataactctagctgctacaatcaataaacccccaaatcccagtggctttataaaaaaaaaatcggatagatattagtagaatctgatatgggtcaggtggcttttccttgtgcctttcctctaagtgatgatttggggaaacaccttcttgccatcctgtaaccttttcatctcagagtcattcacttctagcagtgtggatggaataaagaagacttacctgcagcagtctacaagtgacacatcacttctgtttacattccactgccgagacttaggtgaccttacctagattcttggggagctggagtttatgaatacatttagctccatgccaaggaaaactgaaatggatggtgaacacataacgttgtgcctaccacagccaggcactgtggttcacatatttaattcatttaatgtttattgagccttggaaggtagatgctactaacctcatttcatagatgagaagccaaaaatgcagaaagcttaaataacctgcccaagacacacaattagtgaatggtggaaccaagattcaaacatagcctgtctctaatggatgagaaaaacaaaattttatacaagaacatgcaaaaaaatatatcatatgaacaaagaacaagaaaaaagaaaaaaatagagcctgtaatttgtttaggagaaatactcaggctcaataataactaaagaagtggaaatttaagggagtaaaggttttacctatgaaattaacaacaggaacaaaaaacttaatgctatactcagtgctgcaagggtatgatagaaaaaaatatgttgcaagaagagtcactgaagtattaatagtggttgtttacggtagtggatttatgggcgatatgtctcactgttttacctttaaaaattattttatcttataaacacatacacacacacacacacatatgcatatacataaacacatagcctataactggtttacaggaaattccagtttgggctataacctggcaagaaatatagttagccctcatgtgaaacatggactaggcccatgcaggtaaacataagcatttttttaaaatatgaaggcatttatggcccccaaaacttctaccatctcaaagcaaaaaacttatttgtgatatgactatgagagaatgaaacaaatttatttctgtggcttgtgaattctgtcataattttatggtcactcatggaacttgtgtctcttaaattcatttctataaagaaataatggctttgacatttataaatctgtcacaacattagtggagaaagaatattttcatagaatcatttaactttttaaactgctatttaaaactgttacctaatagtaatatcagtcatatagaaagcaatataaagactgtaaatatagaatacagtggtttaaaaggaccagatcctgagaaatggggcatagggttattcaggagagtagggagcagagggtggaatttttcacagggctcatatttctgacaattttgggaaatccattttcagttcagcaaccaattcagtaattactcttttagccaaaaagggaggatctaaccacctcccttctccatcactgaagcatccagagaacagactcaagctgcttatacatatttaaagacaagtaaatttttctgtcatattttctgtatggaaaaaaactcatgaaaatcagctgatgaagatgagctcttttaagtgaattttgaaagatttcattagctgaaccccaaaataatctgtaagcagtaaaatgtcctgaaataagaaactgatcaaagccaatacagactaacataagaccagaagaatatgagaaaagcaaaataaaataaatgcagatagaaaagagatctctaagcctagaaaaattaatgggtaatgggttaattaatgggctaatgtgttaattgataaaaataactaatggattaatgggcacaaaaacatagaaagaatgaataagacctactatttgatagcataacaaggtgactatagtcaataataacctaattggattgtttataacttaaagaataaatgctcgaggggatggatacgtcattctccataatgtgcttatttcacattgaatgcctgtatcaaaacatctcatgtacatgataaatgtgtacacctactatgtacccacaaaaattaaaaaaagatgtttaaagaaaaatcaaatttggataatattttcttgatcaaggaacaatgtatggtatcatctttaaggctcatttcactgagtctaaataatgggtttgccttgcttactacatatgattctcaaaattaggcttccagatttgcattagtcaaagaaactgttagcaacaagtatttttgaagtatggccagttatcaccacagcgtttttattttttaaggcagtatttctcaaagtgtaacccatataatactgattttgagacacagtaataagatattatacaaatgaagatcctgtgctgggtgtaccagtattattaaaagatttatttatgacaaaactttcagagcctttaatactagtacttactctggttctgcaatggacggggggaagagggatatataatattcagcatttcaccagtgccatgaaacatagtgagggaccaatgtcttctggatcacactttggaagcaccgatttggcatcatttcttagcaccaaccaaggcctttccttttagttgtgagaggtaggataatacagcagttaggagtacggactctggatgtagacactggtgtttcaacactgactgtggcctgttgtggactgttgggcaaattgttttatctcttggtgtttcattttcttcatctctagggtggaggtaatagcagtgcctggctcagagacagcattaaataacttgatacacttaaagtacctagaacatttctgagcaggatacacttaaagtacctagaacatttctgagcatacagtaaacttaactccatgttgctcttggctactaaggcaagtgagcatatacatcgaataagtatccttctttattagaacaacgccaaatctattttgggctatgttatgcagagcatcttctttattttgtggggactattttctccctgagactacaaatgataaactcattttttaaagtctaaaatttgtaattaaaaccaggaagattttcttttttctagattaaaaacatagcatttgaacctttgttttttccctcttaacactcccattcttatcatgttgatgtaatatagtgataaatgaagatattttcgtctttgttttgccaacagggcttccaagatgaccagaacattttactaaggaatatctcttaaattctgcatcaatgaacaaccagagcactgaggtttaattagtgccttaccacagacaatgttttcacaaacataagagcacttgcgattcttcctgcaccaatttcctttagcccaggttccctccttgctctcacctgtaggttcaactatatttacgttcactcccattcaggaagcattatttttcatttatttaaatccatttcattctttaagaaggatttcaggcagatcacgagagactgactaagtacccacattagctttgctacttatcatcttcctctctcccagcaaatgacctgctgctcaggcacccagtagctgggttctgcctagctgcccagatttctcataaagggctcacgcactacccagcgcccattgcctcgatcctgtctcagcctcaaacatcctttgttccaacccctaggacccagccaaccagatttcctatatcactatctgctctaaaaactcttgaccaggccgggcgcggtggctcacgcatgtaatcccagcactttgggaggccgaggcgagtggatcacgaggtcaggagatcgagaccatcttggctaacacggtgaaacctcctctctactaaaaatacaaaaaatcagctgggcgtggtggcgggcgcctgtagtcccagctactcgggaggctgaggcaggagaatggcgtgaacccggcaggcagagcttgcagtgagccgagatcgcgccactgcactccagcctgggcgacagagcaagactccgtctcaaaaacaaaaaacaaaaaacaaaaaaactctttaccaaactcctgtttatagaccctcttgaagaaaaacataacgaaaacaataaatggtgatggttaatattctaaaggaagtcatgccaagttccatgttcactttttgttcagaaagaaaaatttcacattacagaattcatagaaagcataaatttcttatgggaaatctatgtccaaaagtttctcagctttctgtttgatgttgcaactaaataagtggaacctgttcattaagccccaccaatgaagtaacagatgccatcactgtccatcaaaaatggccagaatattccataattacacaggcagtaggaagaaaaaaaatggccagagtagctcacgttcctttgaggcctagaactgttcgaatccagagaatatagatatgcttagactcatgaataaaaaagaaatcggtcgggcgcggtggctcacgcctgtaatcccagcactttgggaggccgaggcgggcagatcacgaggtcaggagatcgagaccatcctggctaacacggtgaaacccgtctctactaaaaatacaaaaaattagccaggcatggtggcgggtgcctgtagtcccagctagtcaggaggctgaggcaggagaatggcgtgaacccgggaggcggagcttgtagtgagccgagattgcgccactgcactccagcctgggcgacagagcgagactccgtctcaaaaaaaaaaaaaaaaaaaaaaaaaaaggaaaaagaaatcaagggttcgaaacgtgatatctgaatggtatataataatgtttggggttttttctgactgaatgatttatttcgattttctcatcttaaaattataagaccctaaaacagattaatttttttctgatatttatctgctctctcagcttacttacataatattgcccaaactttttctacatttttattgtacaaaaatatatggtggtaaatacatagagcgtatgtataatttgcaatttttactaattttaagtgtacaattcattggcattaattacattcacaatgttatgcaactgtcatcactgttttcgaaaactttttttatctcaaacaaaaactctgtattcattcaataacctcccataaaaaaaataacctcccatttctctttccctcattccctagtaacctctattttactttctgtctccatgaatttgctaattctagatattttatatacatggaagcatataatatttttccttttgtgtctagttgatttcagttagcaaaatgttttcaaggttcacccctgttctagcgtatcattcctttttttctggctgaataatattccattgtacaaatataccacagtttgcttatccatttatctgttgatagatagttgagttgtgtggccttttggctactataaatattactgccatgaactttcacgtacaagtgtctatttgagttcctgttttcaattatttcaggcatacacctaggtaataggggtggaattgctgagtcatatggtcattctgtttggctttttgaggaacctcaaaaactgtttttcacaatggctgtaccactttatattcccactagcaatatacatgggttccaatttcttcacatccttgccaacacttgttattttctgggaagtgtgtgtgtgtgtgtctgtgtgtgttatagctatcctagtaggtgtgaagtggtatcgcattatgattcttatttgcactcccctaatgaataatgatattgggcatcatttcatgtgcttattgatcatctgcatatcctccttagagaagtatctatttaagtcctttgcccatttgttaaattgggttgtctttctattattgagttgtacgagttctttctatattctatatattaaacacttctcagatatatgattggcaaatatttaatattttctcccattctgtagggtgtctttgcactttcttaataatgtcctttgattcacaaatgtgtttaagtttgatgaagtacaatttatctgttttctcttttgttgctcgtgtgttttgtgccatatctaagaattcgttgccaaatctaagctcatgaagatttatccctatgttttcttctaagagttttatcattttggttcttatatttaggttgttgatctatttttagtaaatctttgtatataggataaggtaggggccaaacttcattgtcttgcatgtggaaatctagatgtcccaacaccatctgttgaagagattattatttctttattaaatgatcttggtacctttgtcaaaataaattggccataaatgtttgggtttacttctggactcacaagtctactccattggtatatatatttacctatttttataccagcaccataccgttttgatttcaatggcttttaaatcagaaaattaaattttaaagagtgtttttaagtcagaaagtgtgagtactctaactttgttcttctttaatagagattgtcttagcaactcagggccccttgcaatgccatatgaatgtgagtgtaggctttctcatttctgcaaaaaaaaaaaaagctattaagattttgatatgaattacattgaatctgtaaatagctttgagccatattgacatcttagcaatgtaaatctttccatgaacatgaaatgtctttccatttatttaggtcttctttaatatagttcagaaatgttttctagttttaaatgtccaagtcttttacctccttggttgaatttattcctagttcctttattcttttagatgctattttaaatggaattactttcttaatttccttcccagactgctcattgctcttgcacaaaaacacaattgattttttgtttgtttgtttttgttttgtgaactgaccttgtactctgtaactttcctgaatttgtttattagttctggtggttttcttgttcattatttgggattttctatacatagaatcatgacatctgtgaataaaaataattttacttatttctttccaatttggatgctttgtatttctttttctcatcaaattactctagctagaatttccagcacaatgttgaatagcaggggtgtcagtgaatattcttctctttctcctgatgttagtgggaaagttttcaggctttcgccattgcctgtgatgttagctatgggtttttcataaatgacttttttcatgttacagaaattttcttctattcctagttttctgagggtttttattctaaaagagtgttggatatcatcatgttttgagtagacaataactggaacagaaaataactctttgcttggtctctggttctcttatcatactgaaatttatgggtcattgctcatctaacaggaacaagaattagacttggccacaagagggaatcacttcagattctggctagtatttgatatataatctttgctgctgacctgtacagttctgcattcttagatcatgatttatgtcacttctgcctatgaatccagactatacacatgccttggccctacacgtgggaccgggtcttttgactcaccacaaacactctacagtctctcatctcagccctaatcactacattgacattgaatgcatgcagaaccccagtttctacagtaaatgattccttcccaccttccccaagctgtggcccgttgctcagtccgtcataatctaccaagccttaagtcaacctctcagcatgtcttgtcaagcctctatctctctcttccccaggctttctgggcattcctgctaacttgatggttgtggtcactctgccttgagagcctgtctccacagagttctcactgtcactcacacatcaccacttcctagtctcttctctgggctgatccaataataaactccagccatctttgatttccaccgaaaaaaacctcttcatacaaggtatatgtgtagagcagaccactagaggtttggggagatggtctgtgttcatagcacagtaacaacaaagcagaatcttagattccatcattcttaaaaaataccctcagctatctgtgctgcttgggggtgcaagtctcccacaatattgcatatgcccttctctctttcatttcactgctcactttattatgcagaaaagtttagctcttttttaaaaatctattctaaagtagattctggcagccccattgcacatcagcagacttattcttgtgctatgtctcactctttgttcttccctccagccacaggaaaagagcagaataatatcgatgttttcccctactcttatcaattagcctgcctcccttagaagaggaaaaaggctgcagtcatcttgggttttaaatagcagggtctctctctctctctctttctctctctctctctctctctcacacacacacacacacacacacacacaaacacatacacacacacacacataatacagtttgaatacttaaataccttatactaaaatataagatattgtatataataccctgatcccatagtctccaaactgtgtacagaggtggcccagggcaccacaagtgaattctcagaggtgtcatgagatattttatatttttgagggagtcagacaccatgcaaactaccagctctaggtggttcatagttttaatgttagaccatactacattccttttgataatttcatatctttgcaacgctgagttttctgtggttgctttgataaaaaaaagaagtaacattctaaaatcaatgtgtaataagaaattagaatgttgggaaccgatctgattccaaggattgagaagttttgcagtggtcaactggtatagacatcccattagtaagtaattacaaatattttggaataaaatataaatatttttcttcatatatatacacacacatacacatgtacataaatatatatttatatgtaactttttaaaatattactaagttcttaagacttgctttttaataaaatattaaaaccttaggactttactatttaataaaagaatctactaagtatttcctttggcctgggatgttgtgaaaaagataccaagaaagtctgaggaactttggctctacttttttatacacatgacaactaaaaaaaaaaacaacaacatatttaacattacaaaaaaaaggtaactagagtaactaatacaaacatctagggaaatcattactgtagaaagcattaatttatgagaacattattgtaattaacattacctcctttttaatgtaagtacctgagaaactttaaagggcatttccatttgtgctgctatagcaaaatatctgaaactgggtaatttataaataatagaaatttattttttcatagtttttggaggctgcaaagtccaagatcaaggcatcagcaggttccttatctggtgagggcccaatctctcattccaggatggcaccttgctgtgtcctccagagcagatgaacattatattttcataggtggaaagcagaagggctaaagaacaaaaaggggtgacagctcccttgaacttctttaacaaaggaactcaaccccttcatgagggatctgcctcatgactcagtccctcctaaaggcccacctcttaacactattgcattggcggttaagtttcaacatatgaatttttgaggggacacaaacgttcaaaccatagcaggtataaatcaggaaagtctctggagaaagtcaaacactaattaataaaattgtttggagaaacaagccactatggttagttaaatctttctcatcaactgaatgttaatgaaaaatcttatgttaatcctttttctgaaagtttaaaaaaaaaacatgttggccatttgtctgtctttgtatgtacaatttgctaaatataatttaattttcttttggtgacaaagtaagttaataggaggttaaattattttcccagtgctaaaacaatagtgagtggcagaaccagcatttgaaaccagacattcaggctcaagcacttggatgctgagctcctctcattagcatcaggatctttggtctgatcagcagttatttctggaccataggtgttggaggtattaaacattggcttgaatattacttaattaaaggacacccccctggaattcaatttttgaaagtactagtggaattgtaaaaaaaataaataaataactaaactagaagtcagagccttaggtttaaatgccaggtctaccacttcctggcatttaaacctttttgatctcattacctttcctataaagtgggttgttgttacaatcaaatgagacaatacataaaagagttctctgcacattgtgaatattgagcattaacatcatttctttttcttatttgactctttctcctagaagtggagtgtagaaagaaaaaaaaggctggatatggtagctcatgcttgtaatctcaacattttgagaggctgaggcagaaggatcacttgagctcaggagttcaagaccaacctgggcaacatagcgagaccccatctctacaaaaaataaaaaattagctgggcgtggtggcatgcacctgtagtcccagcaacttgggaagctgaggtgggaggatctcttgagcctagaaggtcaaggctgcagtaagccatgatcatgccactgtattccagcctgggtgacaaagtgagaccctgtctcaaaaaaaaataaataaaagaaagaaagaaaagaaaaataataataaaatagagagtcaattacgtgactctgtctactctatattatagttattcacatacatttcccccgctatattttctaagtcacgctatatttcccatcaccccctgagcccgtcattaacctttgcaattctcatttgctgaagaatagtgactcattcataattttaaaaagaatcagtggaaagcataattgggttaacccaacaattctgcttctaaaagtacatactaaggcagtctttcccaaagtgctaggggggaacattaattatatgagagatcaatgaggatcaatacgtttgaaaaatgtcatatattagattccaccttagaaagtcaatgttaatgggcatatgtattaaatgctctgagaaatactgcaggaaagaagttcgttcaatttgttctacctcttcattttcgaattcattgatcaccctcctccccaccaacagatgattttttacctaacagctatgttatactgtttaagagtatgagctctggagtcacattgctgggttaaaattctgcccagtacaactgttaagccatgtgacctgacttctctaatcctcacctctctcatccataaaatggaaataatactaatcaaactttaaaaatttgcgagtattggataagaaaatgcacgtaaaacacatactaaatgttcaatacatttaggtaaagttgttaacattactcaaaattagtgtttgtagactataatttgaaaatgccatcgtaagtaaacagataaaagaacaaaaatgcatatacaagtaattgctgagggtctataaagtgctactgaaaacaggaaatttattgtaaggcttccaggtagcatatgtctgtgaaaaggaaggagattatttgcaatcttggcaatttgagttttcattcagttaggaaggaccaggcagctgctgtggccattgctgggatctgctgatgtctctgtagatgtttgcaggcacacagatggtccacaggacaaaggaaaagctggtgctcaaagacagataaaggaaaggcagagagagaagggagtgctgactgctgctgctcctcttaccccgatcagtggaagggaacacctgtatctccattaattcagtctccttccttagctcatggagagaaaagatgttcttcttagaaggtactattgtcaaagaaagataaatcatattctctatctttaaaaataaagtagagaattatgtagtaaaaacaaaaactgattttcttctaaaatacagggttaggtaaaatcataaaagaagacaatacagagtaatacagtaggcttcttttaggttggtgggttagaaaattcctaaggagaaattaagcaactaatcttgctgttgttcatgtattcgtatgactattacttttccatacagcaaagtattttacatgctactgaaaaactttaattacaaaaacacttcaatgtaattaataacaatttcttcgcatttacacaatgggaaaatggaagattttctctatgttaatgcatagttggcaaacaaatagttagttatacttgactgtaataatcaaatagaccttttgtcttaaacaaaatgaaatattacattttctacaatgtactttggctacatgcttttctatgattaagctgtctcttcaatgtgttagtcacacaattcatacctggataaggttgtatggctcatcaagaaatctttatgtgacacagagttacataagtaggctgcctgatgtattatttcttttctgagtgtgatgatgagcatttgattcatttgttcatgtctctctaagaatgatttatcaatgtcaatgacacttagatatctgacagcagttaatgttgctttaagtaaatatggcagccctactaaaggtatccagggaaaatattgcttcttatgtggataagttcatttagttagtgactgaaactctaacaagtcaacctcaacagcctattgtattttttgtaagcaaactggagaaactctctggagtacacaaaaagtattccctcagttcaaatgttacagttgtataaatcaactagcagagccaagaaaagtaatgtaagcctgaactcttggttttttccttttttcttgcatgcaatagcagtttggtgttttgttctgacattaaaagcatcttaaattagaaactactgtttttgtacaaattaacgtatgtaattttaactatggcatcttttttaattcattaatataatcagatattatgccatcttctgatagttctctcttgaatcagatcaatctcaaaactttgctcttgcaaagtgctgcagaagtgaagccagctccttcagcaggatctgtttggctgcccagcctcactgatgtgagggaagggaaaaacaggcagtatagaagcctctccaggtgggaggggctcagaagttgataggtacaacctcacaatgtcagaaattggaatttgttgagattacaggtgaggagatagtgccatgttaatttttttttcttggaagttagtgctgcatgcaaacaatcatggatgtatattggtacttattcaattgtcactgaaaaaaatgtgttcttattgcattcttctgaccagaaggagatttttcagtgggcgcttttgctagggctgaagaaatatgaatcctgtctttcagtgtcccaaaaataccaatatattttatttcttggtcttttgttatctgttattctctttcctttttaccttttttattttaaatactctcaaggtatttctgggttgaggaaagttgactccatgcagaaatcaaaatgtatcactcttaatttccaaagcaattgcatttatctgtaggcaaatacctagaagtcaggtttctttgacaattaaaaaaataataatgggtaaaaacattcaaatagcataaagggcttctgtggcactgtgttctgtgttgttgcagcatattaatacagaactcttcagagtcttaattcacttcagcagcccctgtaaaaattcatgccagagagtgggagagaaggttggcagccagaggactagaagccaaatgcttcctcactggcagtggcatctggataggaggttggcctgcctccgggactcttggccaacagcactgttgtctatacagacggctgtgtatctgttcaagagtccaacaactgtgtgtgtgtgtattttggtaagctattatttctgggccaaagatttccatggcatttttgcatctgttggcaccaattctatatttggctcccttcattcccacccgctgctactttttagttttctgatcaaaaacattgcacataaatggaaatgtattaaggggagaaaaaatatttttaaagatttttcttaaacccaacaaagcatatatagacatgacattgactttattccagacaggacattttcctttccacaagctatgaataatgttaaaattctaatctcagtgcatttttcttgatcctttagatagaatctaattatagaattatcagaagttactttaatcagcaatatactgaaccattaagaaatgcaaagtcaagctactctttcaacgtttccaaaggaataatcattttataattttatagaatatagttaatgcaatatggtaccaagagttgccaaacatccaatcaactggcttgtcaaaatcctttactgtgcaaggttacaacctcttagccttttaaggttctactatcccaaacttatttgttttgaggatatttctacactaattcaattcaactaacatctcttggatggtccctttatgtaaaatgctgggggatgcaaaattgaataagatgtctgccttaaagtgttcttttttaatgaagaaaactgagaacagacttgtcaacaagtaacaagaacatcagaaaaaaagacataaaagtcaatggaggtccaaagtacattgcagcacataccaggaatgtggcaataaggaaatgaactccatttttatgtgtatcttctggaaaaattttagttgaaattagtgttctaaaactggaagggtccatgggaatcatgtaattctgaatctctcctctacattttattgatgaggacacttatttggtcatggtctcacagtgattaatactaggacacagatccagttctctcaatgttactcctcttgattttagaattaagacatacttaaaatgaaatttgcaggaaaatcttttaaaatgccatggcataatttcatggaataataatgaacagtaaataattcccatgactagggaatcactatgtgatgtaaatgagaaatggaatagagttcctgcaatcacagacatttctctttggctagagtggctagagcaggactcctagaaagatcactcaaaaatgacttatagagggctgggaggctcatgcctgtaatcccagcactttgggaggccaaggcgggtggatcacctaaggtcaggggttcaagaccagcctgaccaacgtggtgaaactccatcgctactaaaaatacaaaattagccgagcgtggtggtgcatgcctgtaatcccagctacttgggaggctgaggcaggagaattgcttaaacccaggaggcgaaagttgcagtgaattgcatttttgccattgcactccagcctgggtgagagagcgagataaaataatcttctgctctaattcagcataccaagtgccatgtctataggaacagaatattcctatcgtatttctcattgacaggttaataaattagatttttaggcttctgcatcaaccttgtgcacttaattaatatgagttcattcctaaaagatctgttcttgagcaggctaacattaggcttctgcgtgtttatgatgagggtcacagtttaacaccttgcttctcaaagtatggtcctcaggccagcagcatcagtatcagtaggtagcctgttggaaatgcagaatagacctactaaatcaagaatttattgtctaacaagatcccagacaatttgtatgcatttgtcccgggtatttctaaaatttgagaaacactactctcgagcaggaacaagcaaaatttttctggagaagaccgaatagtaaatattttaggttttgtagaatatatggtctttgttgcaactacttaactctgccgttttagtacaaaagcagccacagacaatatggaaaccaatgagcatggctatgtcccaatacaactctatatggacactgaaacttgaatttcatataatatttatattgcaaaatatttttatttttttaaccacttaaaaacctttcttaacttgcaaggccttacaacaatagagggcaagccagattatcctactggtaatagtttgcccatgctttgctctggaccagagaaaactccattaggatcaagtcatcctatgaagtcaggcattccctattgacccatccccaattcccatgtgccaagtgagacttttcctctttaaatttccagagatgggctgggtgcgatggctcacacttataattgcagcactttgggaaactgaggcaggaggattgcttgagctcagttcgagactagcctgggcaacacagtgatacctcatctctactaaaacggaaaaaaaaaaaaaggtgtgatggtgcaagcctgtagtcccagctacttaagaggctgagctgggaggatcacctgagcctgggagatcgagtctgcaatgaaccgtgatcatgccagcgcactccagagtaggtgatagagtaagaccctatctcaaaataaataaattttcagagatagaataccttttttgtttttatcaaacttgataaagtataattcaatacttttaaataatttaacatttaaattaagacattataggactacaggaattctggaatatagatgcagaacttgatagagaattagctgattctctgggaactgtaacataatttggaatatcaatgttctagtcaaacaagcaatttccactttgtttcatgtggttacctgggttctctgaccacaagcagcaatgaagaagtgatataccaatgaaccctactacaaccatagactcatatgcaccaaggatgagcaaagtttaggtaacaaagtgcagaaagaagcaggcatagactacctattacctaatttttaatccatgtttatatgtcccaaatggcaggaatatttggtctcttaactccccgtcaccatttgtgcagcaggatatccacttggaagcatgccacaatcaccagtcagccctgccaccgcttagttcatctgtcagccacagaaatattttggccaccatcactgggtttattttttccagtgagataaggcaattgaccctgcacttctaatgagtggtataaagtaagctgatagattctgaatatcattcttactgactgaattattagatctttttctcctcaactggattaacaacaaaaaagtgtttcaatcatgatactttaagtaacaagtttagataacaataaagctcccatatgtgatgtatgtaagtttctagacatccatttcacattaatagttctatcatctgaaggaatgtttactctttttattgtcatgacacaaatttctaattttatgtatttatccccagttctaaagtttgaagacacacacataatcacctgaagaacttttttttatttttttttaagacagtcttgctctgtagcacagggtggagtgcagtggcgtgatctcggctcactgcaacctccacctcctgggttcaagcagttctcttgcctcagtctctcaagttatctgggactacatctgtgccaccatgcccggctaatttttgtatttttagtaaaggggtttcactgtgttggacaggctgttcttgaactcttggcctcatgtgatcttcctgcctcgacctcccaaagtgctgggattagaggcatgagccaacgcatccggcccaggaactttttaaacatgcccatgagcaaggggctccccaaaatgaatagaagcagagtacctagtggtgggtcctggcatctctatttaaaaaaaaaagtctacctcgcttgaccagttgcaacttttgtgcctctaagaagtatctgaatagcttagagtagcaccttgggatatcgactaccctgggatattactaatcttagtctttactcaggaacaaatgagcgtaatcttgttttgctttttaattttcattgttattttggagtctgtggagaaaaaaaataatttaattggtgttaaagcagttcatcatatgaaacagaatatgaaaataatctgactattcaatttcaaactgttgtattaatagtaattaaattgttaatcattgagccatgtctatgccaggcaccatgctagggtgctttacatacattatctcatttaaccttctcagtaaccgcataatacaagttggaaatgccctcacattgcactgcaaaaatggaaagatcagacagattaagtaacttatccaaactcacagctagttagcaggaccacaatttgaatctatgtctttaggattccaaaaatccacaattttaatctctccatatataattcaagaatccaaaagaaccacagttaaggcaaatagcgtctttgactatgacctaaaaacaaaaaataaatttaaaaaataaaataaaataaattgggttcctttcattacttacactttgcttgcctgtgcacataactcgactcttggttaatcaccagttagctcaaacaggttaatcacctcttgaccaatctgtttgaaactggtcaattcagtagaaacaatcaagctggcagcagttttgaatagctgcctcaggaaaatggtcccttcaattctggattgagacatggggttgggataactcacactgccaacgtttccagggaaaatatccaatgcaaggaaggaagaaagaaacaattaaaactaaaaaacaagcgaacatcacatatctatatgtttgtgactatggtttttagcataaatatcccttaataattattgtacatacatgtaaatgggtataatgaatatatgtatgtatgtggatatgtatacacacacacatacacacacagattactagcaggtgagcataaattaaaccaagtgtgaatcctgttattttttagtctttcttccacacctggtgaatttaaacccctataggtcatcttgtcaaaatacaatttagttctgaaataaaataacagaacgggaacaaacacgatccattaaaactcactgccaatgttgccagataactacaaaaaaatagagtgtctcagacagaaatatcaataactttaatgcgtgcgatttgttaacagggaagaaaacaagcaaacttgctctccgctgactgtcactaatatttattcgtccagtgactgttaatcaaaccaagtttacagtcccgtacagcacctgtcacaggtgctgatcattaatcagctattacagcagtttattctgctgctgacaactcgcaattttccactgattcagctagtttgtcaggtgggaattatggcatagcgcatgtgacaaaacacatcaccctttttttttgcattttcaggcttctctctcctgctttctccccctttttagacaaacaatatctgggaactcagaagtaataaggcggaatgcataattaattacccagcttgctctaattagggatgaataagttgtgtccctctcatcatcacaaatgtggtgatgggtaataccagtttatgctgtattaactgcaaatatgcaatccttctgagagcacttttgttgatgaatttgatgaatgtgacaataattagcagagacagatgagagctaaattactactgacaatgtaatgctatcctgctcgagggcctgggaacgtggcaggataacatggcagggacctgggcctcgtttctaattaatagtctttttttctttttctttttttttcttttttctttttttttctttcttttttttttttgccagtgggggaaaaaaggagtaacggtaattgttttcctcaaaggctgcagggagttatcagggtaataaagttaattagcagaacaaacatcctttcactgccttaccagtctgaggaaaagagggtaattcagactgcagaaagatatgactagatgggatgataagaaaagaaatcttacacaggaggccaacagagaatgattttctcccttcatttatttggcttgatgcatggaaagaaattagacagcctcttccttcaggtcacaaagttgctcatgtaaaggactttattgttatgattttgagtttgggaaataaagttagcttagataaactccactgtttacttctttcttttctaggtagtgataggtttgttcaattttatctttattcaagtgcattttcctaatgtcccagacgtagaagtgagttctaatatttgccaaagagaacatttggctgcactttgacttacagaaatctgttttgttctctgaatcttttggaaaaagtaagaaattgttcagcaatttccacgaagtagtactctttattttcctgtgtaaatttaaaaatcaaaatgagatttttttaaatgtatataatctaattctatttttgtaatctcaaaagtcatctttattaaaatgtggcaatattgtcatttctgtcgtggcattgtagatatatgagtaatcaatcaaaaaggtgaatagttcaatgaatctcagttttacatatagctgtattcagtttggtcacattgcttaacataagtagattcaacataatgggaaaacatccaccagacattctgaagactttgcaagtttattttttcctatgaagatcataagtggttggcccccttcaaacatcctacatctgaaatgactgtttagtatgaagtaaataacactaggatgaaagcctgaagctttctaaaataatatccacaaggaggtgtctatgatttttactccttttaggtacatttccaaaaattttcattttatgcttcataaatcattacatatctaagttctacatatttaccatgcatataaatgtgcacacattcatttattgttagagctaaatgaaacacctttcacatgactgtgtgtttaattctaagttaagaacataaggagttaagtggtgaatttctacttctgtgtttgacagtatggcaccaggctgacttttcaacagaatcctatatggatagacttccatgaaaaatgggtgaaacttctaacaaaatggcctttattcctaatatccacattactaaagtactgtactagtccctaaggacaaaagtagtatagaggacataacactgaactgactgagttgtttactggctgtgctaccacatgtgtatgacttgcattgtcctgtcatgtcccttatcgttgatttgctcatctataaaactggttaccctgccctgccaacctcataggattgctatcgagcatacacacacacacacacacacacacacatacacacacacacacactctgtctctctctctctctctctctctcttttagattgctatgttttaccttgtatccttagcagcatttttaattttttgccatataatcaaactttacctttacgtagaactaaaagaagcattccatgctactttccaacaacgtgtaacattttaaaacaagttcacttaccaaaagggagacaaactgaaagaagtaacacaaaaatacaaatgcaaaattgcttttttctagaaatggtctaaaatttttattgtgagagaaagaataacagggaacacatttgtttgtttcctttgggacctaagacaaacgtattgaatattctggtactttcccctctagccactacttccttcattggactgcaaggtatttctgtttggaaaagtaatggagtccagtcaacttcattgatcgccaaggactgtcaaaattataaaacttgctgtggagctctgacatgccagaagccgctagaaaaagaagtttgacattcagaaacttatcaagaggttctactctttggatagagaccaaaatcatactttgaagtaagtagtaatttccaatattagcccattgggtgagctaaaaatgccttagttagatttgccagaattagagattacatttgttagaattaggggttcactaattagatgccctaggcactagccatatgtactattggtattattatgaatctttaggaatttaattctttctttgccttttttactctgaattcctaaatcattgtttgaaagagtattttgaccaatgcccagtttataagggttctggggcatttttgcttcttgtatgagttcagtggagtgttagttggctaactaattacaagggactaaaaataaaccatggtttattattttccaattttgaattacaaaattatttaaatgtctgtaatcgaagtgctacattactatgtaatgaaattacaatacagcttaatgatattaggaaactgcatgcaaaaaaatatttgtacacaaggtggtgatgttagcaaccaactacagtacttttattctgctaaaaaacacaataaataacaacagattactttccccaagtgatccccaaagggcatctttagttgttcatataatgatagcatgtaagggcacagagccacatggaaaacctgtcagcatatgtcattagagtagcagagaaaaaagagaaaaaggacaaatcacaaaatagagaataactgctaaagagtaaaattatgtttacaagtagtaaagattcaagaattcagcccttaatacataagtttccattgactcctatttagatatatatgtccaaggagttacattctaagtgtaaaattgtctctgtagctctaataaaatatacctactttccagacagctttccgtctgaaaacttttgcctcccaagcttccccctgcctttacagttaagtttcctgattccaatcctaactacaaccttggtccactgaggacaatatctttccctctattcatgttccttgtgcacaaattcaagtttttatgtttctattagtataattcagagcaattaaaaattgaagctgcaaaaataagtcacaaacattatttctcatgaaatatttgaccttatcaattctaaaatataaattaatacaagctaacattaaaaccagctcatatttcttgtaaagtggtacattaataatgacctctcaggcataattaattaattttattatatttatccctaaaattcacatatttgttatagtgacatgtatttattctcagatacttttttaaagtaaatgatgtcatcagcaggaacacagaacttgttggctgcaagatagaaagcatatatgccatgaaccaaaaaggtaggaaggtgtattttcaattttaaggttcttctcctaagatgaaaagagctgcaactgtttttgcaagtaagaaagcaaaatatctgttcttgaattatctaaggatgagtcagaaacttaaagccgaagaaaagtaataaataatgacaacagatgtttgtaaacgtgtgctcccctgttcagtgtttgtatgtgttgttttgccttgatgtgctgtcagcagcctctcacctgggagtagtgatatcttatcaaagcccaaacagttcctcttcacaacagacagataatagtccctttcaatttatcatactggaagtctaaaagaaccatgggaacgactggtcaggtgacagcttgatggacagtttgacaccccttaaagcatcatgggaaatggttgtcacctgattttcagagcgaccagggagataaccttcagaatgatgagggaaacaaaaatctgaatatgtgtataagatccagtgccagcatcagtgctcacttaagtgataataagtatgaatttagatgactcaaaatgttgttatcaaacctgaggggttttccaagtccagaagtgcccatcatctctttagatgccttttatatttttattcaaatgtcatttcaaaaatatatacataatataaggctttcattttaaagagacacaatcaaacgtactaaatatttaaccacatgttaaatatattagctgaccactaatattctccagatttcaagtctgctttccttttgacaaactcctcgtataccatatcctaaatatagtctgcataccgcagttctaattaagaaggctattataaaaaaaatcatatagatcaaattttacaggcgggactaactcagactcatgaagatcggtgtagtgttagtgcaaaaaaaaaaaaaaacaaaatgaaatcaatttgaagatctcaggcacaaaaacctttgaatctatattaattcactcatgcagccaacaaacataaattgaacacttactacatgcaagggtctctgctggacatataaagatgagaaaaataaaagcccagttttcaacagctcacagtttgtgagtgaggatagacagttttaaatgatagtagatggcaaaagaaatcatcagtctaaatccactgccttttagttggtgaggcttacacacaattgctgacaacagtgtcccttccatattttctcttgtatattgtatatgcagtttacaatggttttgtggtctgacctaaagacatactccctggaaattgggattccaaagggaaaaaaaaataaggattcggtgtttatacatttattgagtgcactccaactttgaagaatgatttcagaaacggtaaggaagtaaagagacttgagatgaagttcccacaattgagtaggaccctaaacctcacaaactgtctgttccttaggtatttgagctactttttttttcagagcagacactcaaaaacttaattgtaaaattatatctcatatacagaaaatctagaataatacaaaacactcctttataaacttatttcaaaatttattaatcattaagattttgccacatttgtttttatcattcctgttctctctctccttctttccttcctttatccccatttagctatctatatatttttcagtaatgttaataggaagaaatgaaaatagatttgtgtctgattcatctatatacttcttcacaaagcctgccaactgccttgtatatatgtaataaatatttatgaatgaatgaatgatgaataatattcaacctagatcttgtctttgatcttttagatttgtgtttgtacataaatataaaatgtacttattatttttctaaacatatgtaatctttcataaaatactaatctaccccccaaaactatgtccgatcaatgggtctaataaacaaacaacaaattttttttttaatgcagcaggaatgtcaagtgactttccaaagaaagtaaaagataaaagcttaggtgctgctggatctttgtcctgctctgggacaactatagatgctggacaaaaaaaaaccagggatttaaaacagaaactatctttcagaaaaacactctagtgccattgttgaaattggtaccatttggctgcttgacacttttgggataacactctgctttcacaaattttgatgctttggactcacattccaacatgatttttcaaatctagttgtgcgaaagccagacaagccagacaaatagtgagagcaccctccgtgttttccagggaactgaaaaagagccagtaaataatttaaataactcttaccaacagaatattctacatgtaatttttcacacgaagacacattatttggaaaaatatgaatctgaagtttgcaaatgaaaaacaaaatgcttttaagtaccatatgcaaatttaaatacttggagagtgataaaaacacattgtgcttatttcaaattgggagggcaagatgtgggagggagatgtgtcataattgatacatggacaaggtccaagatgctacagaacaactgaattcagaatcatttctgaatcagagctgtggtttaaaatgcttttcctttccttgttgaaataaacccatggaacatcaagttacgacaagtcccagatgtagtccctagttcacctgatatgaattaagtttcattgttaacaactaatgtccttatttaagccaacgaaataagctaaatataaagccagtaccaagcctcataacgtgtttcataataatgccaaaatctgtggtctggaaacttagaataaatactaaatgtgaaattttcaatcagacacacattttctcagaaaaaaaaatcagacaaaaaattccacaaaaagaaaaaaaaaagatttattagttaattcataaaaccatatgacttgaaaatattacatgcacttttccattatacatttcaaaatataaggtcagcttgactgttaagcagcattttggaggtcagaaaagtcttacattattggctagtgtaagttatatgaattgcggactttttaagcaccatgtgtacttagagtgtataaagttggggatcttttgattcaaagcatgtaagttccactgtttagattcttccactaaggtataacagagtctccgtgtgagacacaaaggaaaccatgtgtcttgtgactcagattagggtttttaagttatttatataacctctcttctgtcaaggcatgtacactgtgcttcaaatgtgggaaattctggattcatttctcttatttttctgattgcatctttccaaatttggtaagtcttggtattctaaatgcgaaaagcttttcattaggtaccttattttatataaacttttttgtcatttaatcacttttaatgattaaacaacatgtagcttacacaattagaaaatggttttaaggtttcaaaatcctctgaacttgtcgtatttattctgtacctttctagtaaactggaggcttgtcagagtagtgaataaatgagtatgctgttttctttaaaaaaagatatttagaaatccatctgatttcctcagtgcctaaaagtaaccattaagaaccattaagaattatacctgaggcttaatacctaggtgatgaaataatctgcacaacaaactcctgtgacacaactttacctgtataacaaatctgcacatgtacccagaaacctaaaataaacgtttttaaaaaagactgttaccctgttgttacagcttttatgacttctttaccgctaaaaatgtttaatttttgtcataaaaatatgaaaattgagaaaaacagggggctatggcaggatatctcactaatactattttaaacatttgctattacattatttaagctacatgtttaaatttataagcccctgttttgagtgcagaaaggggattctagctttttatccaatttctcctcagagttctgatttgtaattattcagagatttatgataaaatttctgaacttcatatatgctgaattatcataggattatcaaaaaatagcaccttacatggttcaactttcacttgtactaattcattgtcatacattactcttttgaaggatgtgaaagggaaaaaaaacaaagttaggtttacagtaattcttagaatccaagtagcgttagtacctacattagcacattttttttctagaccgttcaactataatgaaaactcaaagtggaaagtgaaattatgcccaaccaagtgactattttgtgtgcattacatcaaataaacagtttgactttttccactgagtatgcttaactgacagttgttttggaattttacaggcacagccatagtgtttttacaatcaagctgtgcttcccattatctgttatatatggcactttaaactctccactttctttgtagccttatagttagcaaagaacaaatgaacgtcactaatgtcattacattccacccttgtaatgttctttatctgtcatctttgaaaattcctctcacctcctcttttgtcagccaaaaagatttaatttgttcttatttcttcctcttcaccatcttaggaaagttacttaaagttctctgagactcagtttcctcatttataaagttgaaataactatacatacttcgatttgttaggaagattgaagattactataagtaactgcatagtacatactgtgacacagtctgctctccataagaggtcattccctcattttgattaatattgaaattcttattgactgacttgtatcaaaagacacattattcaatgtcttaaacaaacgtcttttctcaattgtactgaagccaaggtgtcatcagcaggtactaatatttcttccggatctattcattaaaaaggactgaacacaaacataatcctgaatcataagactgaacattgccaatgctcagaaagcagaatcctccccaaagacaaaaaaaaaaaaaaaaaaaagaaagaaagattttttgcccaccttattttaaaagaccaatgaaaatcttcacttaagacgtttcacctacaattccatgaagcagtagtagaagaacatttggattatgttgtccgagacatttatatggatatccgaaaacttcaaaagatagtcaaggtattattaacattttgttactatgacatcaaggaggaaactgtcacaaaacggtaacaacacaacaaatgcttattcagtgccaggtattgtgctcaagaatttgacatggattattgtatttaatcctcacaaccctactgaggttggtattactattaatgttattttattgtcattttacagatgagaaatatagtcacggttagggctagcagcatggtcaagcatggacgtgagtgttggggctgaaaatggaagtgatctacacaaaacccattatgctcatttggacatgagcttaaaaaataagtctatttttttttcttaaagaaaaagatattcttaaagaaaaaagggtagaaaaaataacatgcaaaattttggctaaagaagaggaataagttaaaaagatctgttttataacatggtgactatagtgaatagtgttttatatgactgaaaactgctaagagagtaggttttaggtgttcacaacacgaaaaagtgttaagtatgtgaggtaatacatatgttaattcgcttaatttagccatcccacaatgtgtacatatatcaaaacatcacgttgtacaccaaacaatattggcaattaaaaaacaaatttaaaaatctaattcaagttgtgagtaaattctcttttaaaattcacctgattattaaataagttaaagtttatttttaaaagctgacaactttttatgaatcttcgagtacagagttcctaacagtgtaactcagatattaatgggttgtgtattaaatggttttattttcagttttgcagcacagaaaactgttgaaatacccatatcaacttgatttttttaacctaattcaggtgtcctttgacatatcttaaacgttgggggtaggggtcagagccagttatccggcttctatttttgtcgattgcttagatttgttcctgtagtcaaaactgttgcccccaaaattggtgtgacacgtgctcatgcataaaatgttaaaatgagtacatccttgtatttgtatttgttttcaacatcgccaacgtgctatgggaaattaaagtaacaaaattaaaaaaaataaaattattaaaaagccaaaaaaatctaattgtaaatatttaaagcatttatttaaaccagtggttctcaatttttttggccttagaactcttagaaacatctttaaaattactgaagacctcaaagagcttttgtctatgtgggttatgtttagcaatagttatcatattaaaaattaaaactgagaaacttctaaaacagttaacattttattttaaaattacaatttaaaaacccatttcatgttaacataaatactatatattttaaaataactataattgtttcttgagaaaagtggcattattttacgttttttcaaatctctgtaatatgtggtataacagaagacagttaaatgtgcatacctgctttgcaattcatctattgtgatatgttattttgaagtctattttttaaaaactaacctcatacaaatgtgggtggaaaaagaggaatattttaatagccacttcagataattatgtctattatttattgatacaccaccgaaactttacaaacatggtttttaaaggttagtttcaaagtggagtttgaaacaatatcaacaaaatttttatttttttttaaatttctattttagagcttggaccacaggcacatgccaccacaactgctaattaaaaaaaaaaaaattgtagagacagggtcttgctatgttgcctaggtcttgaactactagcctcaaggtatcctcctgcctcagcctcccaaagtgttgggattataggtgtaagccaccacttttggcctgaaattcctatacactgtattttaacaccgttagtttatttggcacttagaatggatcttttatataccgatgattttgaagtattacatgttagacacatttggaaaatatctgttcacttcaaatcttccacatattaatacattttattatgccgtatttaaaaattaaaccacattggttaataccatcactggttttattatgaagtctgctcgtgactcaaaaattgcaccagtgctttccttgagatagccatctgacttcaatatacacaagtgctttatgcagatttcccattttgtcaaacagaatgttaaaaatatgcccttgagagtcaaggtttaataaaattaatgacttttactgttttatcaagaacatccctaaagtgaaactggctatttattattttagtgtaagtgtgtggaagtgaagaatacactgactagtagtatagcttagtgccagtaccttaagttcatgagtagttttatccattattgcttgtgcaccatcagtgcaaagtgccaacacagtaaaaaaaaaaaaaaagcaagtaacattttaatatcgttataaaagtaaatttgactttgtagaccccctgaaagggcgtcaaggatctgtagagccctttccgaaccgttgatttaaggttgtactctccttctgccactcaaatattccataggtgattctagaagatgaattaaaatgcaatagaaaagttgcatgtaaaaaactattccttaaagtaagataaataaaatagattttttagaaaggggaaaaaactattcatttgattcttgattctccttgtactataaaagttaagcaaaactcgtccttttttcatatgctatgtaactcggaattcacttctttttaattgcttgtctgaattattgtggtcccatgtctatgcatactagtgattacactgttttgaaaggctttttgagcaatatgttaggagaaagacagaataaacaataagattttcagtctgtaaattcgtcactgtgtataaaccacacagcaggtgaagtcattcaggtcaatagggtatctttcactaatcaacctctacattaatttactaatttctctgtgcctccccaaagtgagaactctattcagatgcattatttgtatttcccattttgaatagataatgaatatattatgatgcaattaaaggtacacagattgtgtgtattaggttttttccataactaattcaagaatgaaataatatatgttgttttgaagtcagttgtcacggataaatgagagaagctggccataattgaacctgaggtgaattcctttagactgggccattgtaaactacttaattctgaaaatatctctttaaaataaattttaaactttatcccaactaattcactatgaataaaggttaaagacttaatcctatgattttataaatccttgttgtttaacaaattacatgtttgttttactctattatcaaaatcagttcataaatgaatcttcttcaacaagaagggttggtgcttagatataaggtaccttgtagtctgtgaaccctttattgtagtcattttacatttttaatatgtcactagtttcttaattattttcttccttttttggttggaatctaatagtaacagacatgtaataacttttaccaaatttccttcatattatttaaataactttatttggggtaaaaataaaactaagatattcattacaggagtggtatgagtggggaatagagtgaaggtggtatatttgccttgacctttcaaaaatcacctgccatttctgtactaaagtcatgctaaccagggactacctttgagcttgcctgtttcactctttcctggtacaacagtacccctcaacctccttcatcttttcctttaaatgctactcattcttcaaggatctcctcaataaaacctactgatacaggtgccatacttagcttcttgtttatttacagtctaaaggcattgcttgtgtttcttcagcatttcttctagctcattaccatagagctaagttcttaataggcaccgctgaaaaaattgtcatggtcaaatataaactattagaaggaaacaaacaaatgaaagttagtttgttagaaggatgcttttcacaagtgatttgctacatatcatgattttgggaaatcaacacaaaattagaaatgggaacagtttaaaactcagaaaaacaatttccctaaggaaattataaattattttgccctctaagcactgaataatattgagtaaaggtttttttttgtttgtttgtttgcttgcttggttggtttttttttttttaagaaagagtaaaatgttagctataagattgctataatttgttaatggactaagcaatattcatagtaaagaagaaaagaaacaatgtctgctttgctttcttaaaaggccatgtattaagaggcataacacaaatcttataagtttggaaaagaagtaaaattggaattcagctcagtccgactctatgtgcttgaaatctacaaaaaattctgtactcacctctgtcacaagcatttaaaatatctatttctgttgaaatatggacctcagtaaggctgccattactgctttcttaactgtatcattagcttttaacagaaatatgaattacaaatattagaagacaccacttccatttttataaatattatcattagaaaactgagaaaggccagaaaaatgaaaatttaatatacattaaatagagaaaaatcgatagcatacgtgtatgctagcaacaactcaataactcattagaaaatagaagttttaaagaagtcctattggaaacacacacacacacacacacacacacacacacaaatatacttttaaatctctaggctggatgcagtggctcacgcctgtaatcccaacactttgggaggctgaggcaggctgatcacctgaggtcagtagttcaagaccagcccagccaacatagtgaaaacccatctctactaaaaatacaaaaattaggctggtgtggtggcacactcctgtagtcccacctactcaagaggctgaggcaggagaatcgcttgaacccaggaggcagaggttgcagtgagccgagatcgtgccactgcactccagcctgggtgacagagacagactctgtctaaaaaacaaacaaacaaacaaacaaaaactctaaatagctctataaaactttcacaagaaaagtgcataacttatatgaagacaactaaaaaaattgttaaaagataattttaaaattttaataaatgtacaactaataataggccgggtgcagtggctcacacctgtaatcccagcaccttgggaggccagggcaagcggatcgcgaagtcaggagattgagactatcctggctaacatggtgaaaccccgtctctactaaaaatagaaaaaaattagccaggcgtggtggtgggtgcctgtagtcccagctactcgggaggctgaggcaggagaatagcatgaacccgggaggcggagcttacagtgaggagagattgcgacgctgcactcaagcctgggcgacagagcgagactccatctcaaaaataaataaataaataaatgtacagttatatcatatgcatgattagggaaactaaacactataaagacagtaattttgccaaattatatatatatatattcacatctaatgttattacaataaatatcttaaacaaattgagagctgggggtcctaaaatgcactggagtactaaacgtgggaaaatgcaaagaaacttttgaaaaagaaatgtactaaaggtaaagtaaccatacacattgtttttttaaacattttttttctttagtgacagggtctaactctgttgcccacactggagtgcagtgccctaatcatggctcactgcagcctcagcctcctggtctcaagtgatcctcctgcctcagcctccagagtagctgagactacgggtgcgcacgaacacacctggcaaattttaaaaaattttttagagacgagggtctcactatgttgcccgagctgatctcaaaatcctggcctcaagcagtcccccctccatggcttcccaaagtgctgggcttacaggcgtgagccactatgactggccaaaccatacaaatgtttttttgggtttttttttttgttttttttttttttagacatggtctcgctctgccatcccagctggagtgcagtgatgccatcatgacctcccaggctcaatggatcctcccatctcaacctccctagtagctgggactacaggtgcatgccaccacaccaggctgatttttgcactttttgtagaaacagggctttaccatgttgctcagactggtctctaactactgggctcaagtgattctcccaccttgccctcccaaagtgctgggattataagcatgagccactgcgcctaactgcacctggcccatacacattttttttaacatacttcagctacaataattaaaagaataaggctgaggccaggcatggtggttcatgcctgtaatcctagcactgtaggaggccaagacaggtggatcatctcgactcaggagttcaagaccagcttgggcaacatagtgaaaccctatctctaccaaaagtagagaaaaagaaaagaagaagaaaaaaagagtagtgctgaaataataatttagcctagtgtataatagctcagatattatgtatgtatacatcctacttatgtatatattatatattatatatacaatttaatgtataataatgtgtaacataagtagtcaatgagggaaaggaaggattattcagcaagtaagaatggaaaataaactaagaatttggaaaaatcattactttagatggttactacatgcacaaataaagtatgcatgttttgaggagaagagctaaaaggaaaaaactcaaaaattttgcaaagagaagattctaaatattgctcatttgtctagagtgtttatggattttaatttctaatggtttctataatgtatgcatctttgtctccttcacaactagcactaagttttccatactattgggtatgcagtgcactttttgcaaagctagttagttgatagagtcattcattcattcatttactcattcaaatattcactattttaaaatatttggccacatttcctttttaaaggtacattttttcctctgaaggagtatattttgatctatctttttatctgtaaaacttaaagttgtatttgttttggttgggccgtattttcctataaaaacaacaacaacccaaaactgaaaacaactttatgcctttagcttttgggttataccatgatttccaccactggagcagttgaataaaacaggatttaagataatagaaacccaaagaacagagtttttcaatgactttcttcataccataattcaaacacactagtctgaacttcattttcccagtgtaatgattttggtcatggataatttgtgaccgagggttgatattggaattggtctcatttcaggatgagagtaagatttatatgagaacagcaagatgatggtcaaaataatctttcaaaagtcaggagataaccttatctcaagagaaaaatactgtccagtgactacatgttctaaaataaggggcttgctcctgatcttgtcaaggaaactgtaaaaatatgataaaatggaagctattacatgagttcagggaaaattgaaggtattttatttaaatgttgctctttccccagtctgctatttgttgttgattttttacaggatattatttcatggcattttgttagaattttgtacctaaaagaaatcttaatataatttgtattattgacctgaaagttcagaggcaacattttcaaatagtaagcaatgtctgagtaaaattttattacttatgacaaaggcatccctgttatttgtagatatattagtcaattgtactaaaagtactctttctagtactctgtagattgtgtttattttttatgtgtgtattctattcttttagaaaccttaagtctataaataatttttttccatttgagtaaaaaatccatttttttcttttcctaaatgattgcacaaggttcctctcagtttcatgaacctatgattgtttaaaaaagctgaatctactttgattcctgatggctgctcatgtattactttgaatttccagaaacatttatgaaatagaaactgatgacatataccagcagtcttgtagagggcactcacttcatgtagtccattttgctgagcactttagggcatgtgatacttaatagctggtaattttttaatatattcataggcagacagacagatatggatagatgggtgaataaatggatggatagatggatggatgaatggagggtcagggaggtgaccctatttgtatagtttggtctattcctgatgaggccaaagccttaaactaatttctttccaaggcctttgtatgacagacatcatctgtcttgccgagtgcttctgcaggagcctgtccaacactgttcctttatgaatggcctcccggggtcctcaggaaccatgccagagttttgccaacttagattatcactcatgaagatccttccaggctttggttatttccatggctgctgatttttacatttcttccccctcagagcagcactgaactcatcaaatacaatttaattctctgttgttgttttctgaaatgagctaaaaataaaaaccaaaaagttcctatataatattttgaaaattatgtaaggaataagtattgatagttcatttttaaaggaatgtacctgtatattctaaagaaaaaaaaaggaatgatctataggaaaggatttatttttctgtgtaaaaatttcataagcaataattcttctttaaaaaaaaagctagaatcaagtggtagcaccatgaattaccaacattcctctgaatacattctgctactagattaaaatgaagcattttgcctctgctttctctctgacaaatgggaacaatcctagccatttggcattaaggctgctgaaagctgacattaatgatcattataaagatttgtcagaatcagtctggatgtacaggctaatacacacactgacattacatggggtatgttttttttttctctgagagatggaacatgaaataatcttggatcaaggatatataggatggcattagacactgaaagaatgtgagaataaagacagggctattttcacagtaataaataatctatctctaaaaataatctctaacttctggcagtccacatgggcaatatctctagttaaaagtcttcatggtatgatttttcataggggaaacataagatacatgcaaaatacattcattcagcaatcattaaaaagtcaggaaacaacaggtgctggagagcatgtggagaaataggaacacttttacactgttggtgggactgtaaactagttcaaccattgtggaagtcagtgtggcgattcctcagggatctagaactagaaataccatttgacccagccatcccattactgggtatatacccaaaggattataaatcatgctgctataaagacacatgcacacgtatgtttattgtggcactattcacaatagcaaagacttggaaccaacccaaatgtccaacaatgatggactggattaagaaaatgtggcacatatacaccatggaatactatgcagccataaaaaatgatgagttcatgtcctttgtagggacatggatgaagctggaaaccatcattctcagcaaactatcacaaatacaaaaaaccgcatgttctcactcataggtaggaattgaacaatgagaacacatggacacaggaaggggaacatcacacactgggacctgttgtggggtagggggagtggggagggatagcattaggagatatacctgttaaatgacgagttaatgggtgcagcacaccaacatggcacatgtatacgtatgtaacaaacctgcacgttgtgcacatgtaccctaaaacttaaagtataataaaataaaaaaataataaaaattatcatccatgtatttcaaacccccatgacacaagtttacctatgtaacaaagctgcacatgtaaccctgaacttaaaaaatgtttaaaaaggaaagaaaatgagaaacgtgaaattcaaaagagtggttatttttgtctaaggagagaaaagaatatgatagggaaggacacttctacctctgaagtagaggggagggaacatgggttcttgttttataactctttatgatatatatacatatatatatatacacacacatttctattatacatacaaaacaatttgtattatacatacataaaatttgtattatacatacaaaacaatataatatatacttttgccttgtatatatagttttgtatgtataaaataagggacttcatgtttttaaaaacgtaattataaataggtaacttgttggaaaagtcaaaaatataatttacatatcaatcaaatgcaagataatttgtaagaaaataactttcatgtccatctgtaactgacgggctcaatatcagaataagccctgtgataactggtgaaagtagtaaatgcttagaagtgattaagcactttatcctcaaaccattttatgggtattatatatttgtgacagctgttagtgccacaagctaatatgaaaaaaacagtggctagtacagtgatacaataacctccttcatcataatacaagatattttccagccatactgtaaattcacatcttccctacagcacatatcacagggcattaaatgtagtagatacataaatgagggcttacttcaaaataacttccattaactgaatatttaacatggtctagataattctcatacattattttttattctcacatccaccccgaaaggtaggtaaacttttttcattttcaatagcagaagctatggctcagagaaattcaagattttgcccaagatcacaaaggtagtgtatggcaaaggcagaatcttaacccaggtcattctattccaagagatgttttctctcaaccatacaaccatctaatggcagataaaactaatcctcacaaccaccttttgaggtaggtcctattgtcttcctaaatttacagatgaggaaactgagtcatgaagagattgtcaacttacctatagtcacacacttgacttgggattggggagacaataagtgggagggagatgggaccagatcccgtatccttagacctggattggtggtgactgctatggtagaaggatgcatgttatgcacaaacttttccaaggcaaactagcaaggaagcctgctgaagggtagaccttactcgggtggcctgaaactgacaaaaatgcttcacattcttaggccttttatgatcctcttaagagtgaaaagaatctccacatgtggcccaaaaaaccaaaacccacagttatatacacttaacacttaaggaattcggtgccccgtcagtgtggtgagacaagaatctccccaaaaactatcactattcctctttctccttctcataactaggcttctgacatcaaagtttactgttaaaagcatccttaatagaaatattactgtatatattttcaccagaaggaaaaatgtcagggggatttggcatgataggtgtttaccataagtttgacatgcattattgttagatcattctactctccctccataatttttctatgcaatttatttatgtgcatatttaagtggtgtgccacttaattgaaattatagtgtgttcaagccagatttgacactgactggcagtcgctgttaaggaatacttggaacctatgaaagggtcattttccaaatagtgcagatataactctattcatccagcagaatattttaggaaatcaaatagctgatagtgccagtacaactaccccattcattccaggcaggattatgtcttatttacctctcacaaccccagaacaacatatgacatatcaggtagtattatagtgccgttagcttcctcaccttctcatacaaagactctgcctacagattcaagtgtcttgaaaataactgtttaaaaatcactcaatcctcagaagacttttaaaaacgtaggtgttgggccgggcgcggtggttcacgcctgtaatcccagcactttgggaggccgtggcaggcggatcacgaggtcgggagatcaagaccatcctagccaacatgatgaaaccccgtctctactaaaatacaaaaaattagctgggtgtggtggtgcacccacctactagctactcaggaggctgaggcaggggaatccctggaaccctggaggtggagattgcagtgagccgagattgtgccattgtactccagcctggcgacagagggagacaccgtctaaaaaaaaaaaaaaaaaaaaaaaaaaaggaggtgtttatattgtgcataaaaacaacccagtatttaattcagttttctgtattttatatccatatatttattattagaaaagtacagcccatagcaacgggattcaaatccagactattgcagatagaggattcttaataggccaacagccaagcaacttcaaggaacaaacaaaaacaataaatagcctcagattttacttttcaattcaaaagggctaacatgttataaagagtaactgaaaattcatcttcctctttctcccctttgtgtctcctactctacttagctcttagacacatcattaacccctctgtgcctcagtttccttatctgtaaaataggataataataataccctctctttcattgttgggtggattagataaattaatacagttaaaatgcacatatcagatacttggagtgtagtaaatgttacattttagttcacattagtattatttataattactgtttcatcgttatattccatgactaaattacatatcatgctttatcttatagtagcttttaaaataataaattgacttaacattttggatacctctatgaaaatttaaaaaaaattagaaacacaattaaatgagaattagtgtatatccaaagatcaccatagtgataatactcattaaaattataaaattgagaccctattgaaatgtcctttattttcctgcagactggattacatgacatcataagtgtgttctgcaaagaaacttcaactgtagatcaaatatgcctataatacaaagttcttcattacaggaaacaactgaataccttgctgtcttttgaactatattttcccctgtagcttttgtgtctattagaaatcaagtaaataggtaagtaatcagtatattgaaactatttgggatactaaaggagaaaaaatctaacatttattgaataccttttaagtgtcagaaagttttgtaagtgctttatatgtgatcattattttatttggtcctcataactgtcccctgagatactattccctggtttacaaatgaggaaatattttctcagagaggtctttatttgatacgattagttggctaagagggagtggatcaggatctaggacttagatcaatctgtctctcaagcctattctctgtagactatgtttattttgagcaactacttttgactgattactcttatatactacataataacacattcccaaaattatctgatagtcgtctttagaatatgacatcatgaccttatgataaatgctaacaaaattttcttacttgctgactctaattagaaggacagttctgtgtaatttttgggaatcctggcaacatttctacaaaggaggggttcctagctagcagctgtagaaaaatctccataaacatttcatttgatattctcatattttacattactgcaagtgttttgcacaccccagggatgtgaaatgtgccatgagaaatgcagtgagctgccagtcagtgccctgcagggggatttatgaaatggtatcctgcaaatgttgtttgtttcttttcagcccaaactgcgtgaattatttcaactgaatcgggagggtagatgaaggggtgcaggaatctaatagagaaacctgcacccctattgttgctgaataagtggtctaaatgatggactacttattgcgaaagtctgtaactttttgttttgagatactggttttatgtggctcctgcaattttttgagcaattactcccatcttcattatctttcttcttaagggaaagccatactcgactctttgacgtgcccatgtccctacagccaggagacaggctgcatgtgaggtgctgattgttttgttctgctcaggttctctttccatgacagaagaagaagggatagtctcaggaggtggaaggagctcggttgattgggaagcatcatggtttcatagaaaaaccttgatcttttaagagcctgagtgttagtggcagctcctctgctttctaattgtgtgacttgggcaaggttacttctcagagactccattttctcatctctaatgtgggagatataatattgtagggagtaaatgagatggtatttctaaaatactgggtactaattatcattagtatctaaaatattaatgataattagtaaaactaattatcactgttttcatcattgatgaggcagtgacacaaaattcccattatgttctaaatacatactgttagatgtctgagagattttacatcattggttgctgcttaaacaaagaccattttttttttactttagatattgaaagcaacccagtagtgttccctttttacttagtggctgcacataccaatcattcgaatgaaaactcacatactctcctgggggctgtgtagtacagtgccacagattatcttactaataactgaaatcctgctgtcttcatatgaatttatcaaattatctacttttataagcataaatgagattatattagcagtgtacaggtgaaaatttattttatttttttattttttatttcttattttattattattgtactttaagttttagggtacatgtgcacaatgtgcaggttagttacatatgtatacatgtgccatgctggtgtgctgcacccattaactcgtcatttcgcattaggtatatctcctaaagctatccctcccccctcccctcaccccacaacagtccccagagtgtgatgttccccttcctgtgtccaagtgatctcattgttcaattcctacctaagagtgagagcatgcagtgtttggttttctatccttgtgatagttgctgagaatgatggtttccagcttcatccacgaactcatcctttttatggctgcatagtattccatagtgtatatgtgccacattttcttaatccagtctatcactgatggacatctgggttggttccaagtctttgctattgtgaatagtgccacaataaacatacgtgtgcatttttctttatagtagcatgatttataatcctttgggtatatgtgcagtaatgggattgatgcatcaaatggtaattctagttctagatccctgaggaatcaccacactgtcttccacaatggttgaactaatttacactcccaacaacagtgtaaaagtgttcctatttctccacatcctctccagcatctgttgtttcctgactttttaatgattgccattctaactggtgtgagatggtatctcattgtggttttgacttgcatttctctgatgaccagtgatgatgaggatttttttatgtgtctattggctgcatagatgtcttcttttgagaagtgtctgttcatatcctttgctcacattttgatgaggttgtttgcttttttcttgaatatttgcttgagttctttgtagattctgcatattagccctttgtcaggtgggtagattgcaaaaattttctcccactctgtaggttgcctgttcattctgatggtagtttcttttgccgtgcagaagctctttagtttaattagattccatttgtctattttggtttttattgccattgcttttggtgttttagtcatgaagtccttgcccatgcctatgtcctgaatggtattgcctaggttttcttctagggtttttatggtttcaagtctaacatttaagtctttaatccatcttgaattaacttttgtataaggtgtaaggaagggatccagtttcagctttctatatatggctagccagttttcccagcaccatttattaaatagggaatcctttcctcatttcttgtttttgtcaggtttgtcaaagatcagatggttgtagatgtgtggtattatttctgaggcctctgttctgttccactggtttatatttctgttttggtaccagtactatgttgttttgattactgtagccttgtagtacagtttgaagtcaggtagcgtgatgcctctagccttgttctttttgcttaggattgtcttgacaatgcaggctcttttttggttccatatgaactttaaagtagttttttccaattctgtgaagaaagtcattggtagcttgatggggatggcattgaatctataaattactttgggcagtatggccattttcaggatattgatacttcctatccatgagcatggaatgttcttccatttgtttgtgtcctctttatttcattgagcagtggtttgtagttctccttgaaggggtacttcacatcccttgtaggttggattcctaggtattttagtctctttgaagcaattgtgaatgggagttcactcatgatttggctctctgtttgtctgttaatggtgtataagaatgcttgtgatttttgcacattgattttgtatcctgagactttgccgaatttgcttatcagcttaaggagattttgggctgagacgatggcgttttctaaatatacaatcatgccatctgcaaacagacaatttgaccttcctcgttccctttatttctttctcttgcctgattgccccggccagaacttccaacattacgctgaataggagtggtgagagagggcatgcctctctcaccagttttcaaagggaatgcttccagtttttgcccatttagtatgatattggctgtgggtttgtcctaaatagctcttgttattttgagatacgttccatcaatacctagtttattgagagtttttagcatgaagtgctgttgaattttgtcaaagcccttttctgcatctattgagataattgtgtggtttttgtcgatggttctctttatgtgatggattacatttattgatttgcatacgttgaaccagccttgcattccagggatgaagccaagttgatcgtggtggataagctttttgatgtgctgctggatttggtttgccagtattttattgaggattttcgcaccaatgttcatcagggttattggtctaaaattatctttttttgttgtgtctctgccaggctttcgtatcagaatgatgctggcctcataaaatgagttagagaggattccctctttttctattgattggaatagtttcagaaggaatggtaccagctcctctttgtacctctggtagaatttggctgtgaatccttctggtcttggactctttttgattggtaggctattaattattgcctcaatttcagagcctgttattgttctattcagagattcaacttcttcctggtttagtgttgggagggtgtatgtgtctaggaatttatccatttcttctagattttcaagtacatttgcatagaggtatttatagtattctctggtggtagtttctatttttgtgggattggtggtgatatcccctttatcattttttattattgcatttgtttaattcttctgtcttttcttcctgattagtcttgctagcagtctatcaattttgctgatcttttcaaaaaaccagctcctgcattcattgatttttttgaagggttttttgtgtctctatctctttcagttctgctctgatcttagttatttcttgccttctgctagcttttgaatttgtttgctctggcttctctagttcttttaattgtgatgttagggtgttgattttagatctttcctgctttctcttgtgggcatttagagctataaatttccctctacacactgctttaaatgtgtcccagagattctggtacgttgtgtctttgttctcattgatttcgaagaacatctttatttctgccttaatttcgttatttacccatgagccattcaggagcaagttattcagtttccatgtagttgtgtggttttgagtgagtttcttaatcctgagttctaatttgattgcactgtggtctgagagacagtttgttgtgatttctgttcctttgcatttgctgaggagtgctttacttccaattatgtggtcagttttagaataagtgtgatgtgttgctgagaagaatgtatattctgttgatttggggtggagagttctgtagatgtctattaggtctgcttgttgcagagctgagttcatgtcctggatatccttgttaaccttctgtctcattgatctgtctaatattgacagtggggtgttaaagtctcccaatattattgtgtgggagtctaagtctctttgtaggtatctaaggacttgctttatgaatctgggtgctcctgtattgggtgcatatatatttaggatagttagctcttcttgttgacttgatcactttaccattatgtaatgaccttctttgtctcttttgatctttgttggcttaaagtctgttttatcagagagtaggattgcaacccctgcctttttttgctttccatttgcttggtagatcttcctccaaccctttatttggagcctatgtgtgtctttgcatgtgagatggatctcctgaatacagcacactgatgggtcttgactctttatccaatttgccagtctctgtcttttaattggaatatttagcccatttacgtttaaggttaatgttgttacgtgtgaatttgatcctgtcattttaatgttcactggttatcttgcccattaattgatgcagtttcttcatagcatcgatggtctttacaatttggcctgtttttgcagtggctggtaccagttgtttctttccatatttagtgcttccttcaggagctcttgcaaggcagccctggtgatgataaaatcattcagcatttgcttgtctgtaaaggattttatttctccttcgcttatgaatcttagttgtctggatatgaaattctgcgttgaaaattcttctctttaagaatgttgaatattggccccactctcttctggcttgtagggtttctgcagagagatccgctgttagtctgatgggcttccctttgtgggtaacttgacctttctctctggctgcccttaacattttttccttcatttcaaccttggtgaatctgacaattatgtgtcttggggttgctcttctcgaggagtatctttctggtgttctctgtatttcctgaatttgaatgttgtcctgccttgctatgttggggaagttctcctggataatattctgaagaatgttttccagcgtggttccattctccccatcactttcaggtacaccaatcaaatgtagatttggtctattcacatagtcccatatttcttggaggctttgttcatttctttttactcttttttctctaaccttgttttctcactttatttcattaatttgatcttcaatcactgatagataccctttcttccacttgatcaaatcagctactgaagcttgtgcattcgtcacgaagttctcgtgccatggttttcagctccatcaggtcatttaaggtcttctctacactgtttattctggttagccattcgtctaatcttttttccaggtttttagcttccttgcgatgggtttgaacatcctcctttaggtcggagaagtttgttattaccgaccttctgaagcctacttctgtcaactcgtcaaagtcattctccatccagctttgttccattgctggcaaggagctgcgatcctttggaggagaagaggtgctctgatttttagaattttcagcttttctgctctggtttctccccatctttgtggttttatctatctttggtctttgatgttggtgatctacagatggggttttggtgtagataagatttttgttgatgttgatgctattcctttctgtttgttagttttccttctaacagtcaggtccctcggctgcaggtctgttggagtttgctggagttccactccagaccctgtttgcctgggtatcaccagcagaggctgcagaacagcaaatatatcagaacagcaaatattgctgcctgatccttcctctgggagcttcgtcccagaggggcagcggcttatatgaggtgtctgtcggcccctactgggagttgtctcccagttaggctacacgggggtcagggacccacttgaggaggcagtctgtttgttctcagatctcaaacgccatgctgggaaaaccactgctctcttcagagctgtcagacagggacgtttaagtctgcagaagttgtctgctgccttttgttcagctatgccctgcccacagaggtggagtctagaggccgtaggctttgttgagctgcggtgggccccacccagttcgagcttccccgccgctttgtttacctactcaagcctcagcaaaggcagatgcccctgccccagccaggctgccatcttgcagatcgatctcagactgctgcgctagcagtgagcgaggctccacgggcgtggcagccacagagccaggcacaggagagaatcaccttgtgtgctggttgctaagaccttgggaacagcacagtatttgggcggggagtgtcctgtttttccaggtagtctatcacagcttcccttggctaggaaagggaaatcccctgactccttgggcttcccgggtgaggtgacaccccaccctgctttggcttgccctccgtgggctgcacctactatccaaccagtcccagtgagatgaaccaggtaactgttggaaatgcagaaatcacccatcttctgtgttgatcacgctgggagctgcagactggagttgttcctatttggccatcttggaacctaccctgtattgtgtttttgactttttaataatagctattctgactggtgtgagatgttatctcattgtggttcttatttgcatttctctgatgattagtgatgctgagcattttttcatatgtttgttgatcacttgtatgtcttcttttaagcaaagtctgttcatgtcctctgttcattatttaatgagtttatttgttttttgcttgttgatttaagttccctaaggattctaaatattaggcctttgttggacgcataatttgcaaataccttctcccattctgtaggttgcctgtttgttctgttgatagtttcttttgctgtgcagagtgttctttagtttaattaggtcccacttgcttatttttgtttttgttgcaattgcttttggggacttagccaaaaattcttggccaaggccaatgttgagaagagtattttgtaggttgtcttccagaatttttatagtttgaggtcttacatttaagcctttaatctatcttgagtaaatttttgtgtattgtgaaaggtaggggtccagcttcaatcttgtacatatggctagacagttatcccagcaccatttattgaatgagtcctttccccattgcttgtttttgtcagccttgtcaaagatcagatggttgtaggtgtgtggctttatttttgagttttctattctgttccattgttctatgtgtctgtttttgtaccagtaccaaactgttttgatgactgtggctatatagtatagtttgaagtcgggtggtatgacgcctctggctgtgttatttttgcttaggattgctttagctattcgggctctttttggttccatatgaatttcacaatagtttttttctaattctgtgaaaaatgacattagtagtttgataggaatagcattggatctgtaagttgctttggtcagtatggccatttttatgacattgattcttttaattcatgagcacagaattttttggatttatttgtgttgtctccgattttgatttgtttcaatagtattttgtagttctccttgcagagatctttcgcctccttggttagctctattcctgggtatttcattttctttgtggctatggtaagtgtgattgtgttgtttatttcactctcagactagatgttactggtgtatagaaatgctactgatttttgtacattgattttgtatcctgaaattttactaaagttgtttaccaattctgggatccttttgatagagtgtttaggatatcctagatacagaatcatatcttcagtgaagagagagagttcgacttcttttcctgtttgaatgccttttgtttctttctcttgcctgattactctggctaggacttctggtactatgctgaataggaatggtgagagtaggactccttgttttgttccagttctcaaagggaatagttcaagcttttgcccaggcagtatgatggctgtgggtttgtcatagatagtgcttattattttgaggtatgtatttttgagcaagtcttaatgtgacttgatatcttagttcacttgggcagctattacaaactaccataaactgggtagcttgtaaacaacagaaatttatttctcatggttctagatgctgggcagtccaagatcaaggcaccagcagagttgatgtttggtaagggcccatttcctaatcatagatggtgccttcttgtgtcttcacatggtggaaaggggtaagacagctctctaggggcctttttataagggcactaatcccatttgtaagggctctgcccttatgacctaatctactcccaaaaggccctgccccctaatatcatcaccttggggtttagattttaacatatgtactttgaagatacagaaacattcagaccatagcacctgatacaaatgtttaagttacaaaagtctacttggccattttctaactatccatggtattttctattttttaataacaaacaatagtacttattgttttattttaaattatgagggtaatttttgcttttcttactgaaaaaaaaatttagaaaatatagaaaaatatttaaaagaaaataaatacaccacaaatttaacccaggggttggcaaattatagccagcaggttgaccaactgttttttatgaatcaaatgttattggaagagagccacacccctttgtttactattatccatggctactttccacacaacgataacagagttgtttatttgagacagagactacatgccccacgaaacctaaaatatttaccacctggccctttacagaaaaagtttgctggtccctgttttaaccctctgaaataatctgttattagtatacttttcaaagggatattctagacatatttttaaatagtcatattgtaaattatgatcacattataaataaagttatatatcttttgctgatttcacttacctccataccatcagcatgttacatataattatgaaagataaccagaggccaacatttttaatcattgtattatatttcatcgtataaaaatattatcatccatttaaataatttactattttttcctcttttttctgacatttagactttctaagtttttggtattttgttttttgttgtttttttttttttttttttttttttttgagacggagtcttgctctgtcaccaggctggagtgcaatggcacgatctcagctcactgcaaactctgcctcccgggttcaagcgattctgctgcctcagcctcccaagtagctgggagtacaggtgcgtgccaccacacccagctaatttttgtatttttagtagagacagggtctcatcatgttggccaggatggtctcgatctcttgacctcgtgatccacccacctcagcctcccaaagtgctgggattacaagcgtgagccactgtgcctggcctctaagtttttttaataaataatactgtggtgaatatctttgtatacaactgcttacatttttatcatttccttagactagatactgttaaatgtaattatggaattaaagggtatcgacatttgtaaggctttggatgaacatgctgaggttttaaaacgccatttccagaaaactctgggcctcttgcaaggttgtataacatcatttgaataagctaccacagtggacatggctttggacttgaagaaattactattttctcatactttaaatgcaaatgaggataattataaaaataactaaactttagtttggatagagcattgttctaagtgattaacatatattaaatcatttaatccttacaacaatcttttgggataggtctcattaccctattttaacagtgaagtaacgattaaaacttagagtgactccgaagctcttgcatttaaccactgtgcttaactgcttgaatatttctgtatgtgttcctttttcttttcatattcactctgtggttctactactgtcaaggattgtgtcctgtgttaggtttctagaaaatatattttcaccctaaaggttctgtgacttctaaaaagttagaaacgctttcactttacggactccatcctgtcagcagagagtagtttaattcacatttgatatttcttttactttcttgggctttctcagtgtttgttttcctcattttctcacctctcagtactttgtgttgtcaaaacttatctccaaagtttaaagtttacatatcatgctgttattttaaaaagtagtctggtggtgcttctaattattgctactgccatgaacacagaggcaggcagaagcagcttccagaagcttaacgaaaatgttatctcctatttttaaaaaggataaatgcagacacaactttggcttgatgttataattacttcttttggatttctagctatttttaaaacaaatttacaccattttgtgcttgtgtgaaacctcaaggataatgttcactagagatcctccaattatttttccagtgagtaagttccacctcttaattgttttaattagcaaacctatgaaaattaattaaaattcttattatacttccaaaattacataccactgactactgaacataaaatcttaatcaaaatattgaaaaggctggaatccaagtcgctttaattgtctaatatgcttcaaagagagaagcaatgaaaacaataaggtgaataaaaagaagatgctttttcagggagtctacaagaccttttacatagatgtttcaaaacgatgatggtgatgcttcagctagtgaaaaattatcagaaagatacaaaaaatgatgacgatgatgatcatcatcatcatgataatgctggtttccttcttcttctactgaggaacagagttggttttcagtagaagtgtctactttgatgagggggaagtaattcctttacagcaagtcccttgaagcactgcatggagattatatgtggccacagcctaaggaaggggcctcagctagtgttcaagcagagaaagaaaggaagaaaaaagagaagcagatggtttgactgacagcaggtgaggaaactggtgctcctaccaagtgctagcctctgggttaggagctttcacataggctttttttttttttcttccagaaaacaaccaggtagaaatttgtaagcattaacctcattgtacaaatcagatttaaagggattaactaaactgcctaaacccatacaaggccttctatcctcaatccttctctctccctttgatgcacaggctaaggtatgcagtttgggtcatgtctcctcatcaaagcctaatccaaattccatccctcctatggtcagagccaggatgaaggtagttgtttaaactggcttttaaagtaaaatcaggtaacaacaatggcaacaacagcaactaactgagtaacaaccacagtgacaacagtaactaattgaaaattagagtttattgtatgccaggctaagtatttcccatacattatctaatttttgctcctaacaactgaataaggaagctactattattattctcttccacgtaggagaaaactaagtcatccacagtttaatattggagttatgtagttggtaagtgacagaatttttatttaaacctaggtctaattttagaaataattttaatcactacttggaaaatacacacacacacaactatgcgtgcgtgcgtgcgtgctcacacacacacacacacacatgcaaagcatgaacaccatcacagaggtacgaccttaagcaagcagatgtatacagcttcttaaattaaaactagatggggtgaggtaaggaagatgttgtaacagatactgatactagtaagttataatagggccagatattcaactttttaaaggcactcatttattttgttttatacatcgagtctcaatagtgttcagtttcccttctagtatttcatcttttgttgtaaacattataaaattgggcttttttcagctcgtgaaaaattatcagaaagatatgaaagctggcacaattattgtatcactgagaaagatgtagctaaatgtggattattgtttatttgaaatatatcaataccttgttgggagagggccagcaaatttcatttaccaaaatgtgaattttgaaacagactacattatctagtacacatagtaggtagttgataaatgttgaaaaactgtgtgaaaaataaagagtcttttatttaatgactacaccttttaaaaaattattatgagtacataatggttgtatatatttatgggacacgtgattttttttccaacttcaatctttttattttctgccagaaagattaggggtaggaaggggtaggaacaaacacatcttattcacaaacagcaacatcatcagtaaacaaatgtggaaaaagtgtccatactcataattaaagtaatgcaaattaaagcaacaatgaagtcgaatttttcacctattaaattagggatacttttttttctttttttaatttttttattatactttaagttctagggtacatgtgcacaacgtgcaggtttgttacatatgtatacatgtgtcatactggtgtgctgcacccattaactcgtcatttacattaggcatatctcctaatgctattcctccctgctccccctacccccgacaggccccagtgtgtaatgttccccttcctgtgtccatgtgttctcactgtttaattcccacctataaatgtgaacatgcggcgtttggttttttgtccttgcgatagtttgctgagaatgatggtttccagcttcatccatgtccctacaaaggacatgaactcatcattttttatggctgcatagtattccatggtgtatatgtgccacattttcttaatccagtctatcattgttggacatttgggttggttccaagtctttgctattgtgaatagtgccacaataaacatacgtgttcatgtgcctttatagcagcatgatttataatcctttgggtatatacccagtgatgggatggctgggtcaaatggtatttctagttctagatccttgaggaatcaccacactgtcttccacaatggctgaactagtttacagtcccaccaacagtgtaaaagtgttcctatttctccacatcctctccagcacctgttgtttcctgacttcttaatgatcgccattctaactggtgtgagatggtatctcattgtggttttgatttgcatttctctgatggccggtgatgatgagcattttttcatgtgtctgttggctgcataaatgtcttcttttgagaagtgtctgttcatatcctttgcccactttttgatggggctgtttgtttttttcttgtaaatttgtttgagttctttgtagattctggatattagccctttgtcagatgagtagattgcaaaaattttctcccattctgtaggttgcctgttcactctgatggtagtttcttttgctgtgcagaagctctttagtttaattagatcccatttgtcaattttggcttttgttgccattgcttttgatattttagacatgaagtccttgcccatgcctatgtcctgaatgatattgcttaggttttcttctagggtttttatggtttcaggtctaacatttcagtctttaatccatcttgaattaatttttgtataaggtgtaaggaaggcatccagtttcagctttctacatatggctagccagttttcccagcaccatttattaaatagggaatcctttccccatttcttgtttttgtcaggtttgtcaaagatcagatggttgtagatgtgtggtattatttctgagggctctattctgttccattggtctatatctctgttttggtaacagtaccatgctgttttggttaccgtagccttgtagtatagtttgaagtcaggtagcgtgatgcctccagctttgttctttttgcttaggattgacttggcaatgtgggctcttttttggttccatgtgaactttaaagtagttttttccaattctgtgaagaaagtcattggtagcttgatggggatggcattgaatctctaaattaccttgggcagtatggccattttcacgatattgattcttcctatccgtgagcatggaatggttttccatttgtttgtgtcctcttttatttcgttgagcagtggtttgtagttctccttgaaggggtccttcacatcccttgtaggttggattcctaggtattttattctctttgaagcaattgtgaatgggagttcactcatgatttggctctctgtttgtctgttattggtgtataagaatgcctgtgatttttgcacattgattttgtatcctgagacttttctgaagttgcttatcagcttaaggagattttgggctgagatgatgggattttctaaatatacaatcgtgtcatctgcagacagggacaatttgacttcctcttttcctaattgaataccctttatttctttctcctgcctgattgccctggccagaacttccaacactacgttgaataggagtggtgagagggcacccctgtcttttgccagttttgaaagggaatgcttccagtttttactcattcagtatgatattggctgtgggtttgtcatagatagctcttattgttttgagatacatcccattgatgggacatgtgatgtattgaaacaggcatatgatgtataacagttgaatcagggtaattggggtatccatcacctcaagcatttattctttctttttgttaaaaacatttcaactctactgttttagttatttttaaatataaaataaattgtggtaaactatagtcatccttttgtgctaacaaatactagatcttattcattctgttgttaaaaatagaatgtttttgtacccattaaccatctctacttcctcctccccacttgccttcccagcctctgatagattgtttccatatcttgactatagtgaatagtgctgcaataaatatggtagtataaatctgtctttgatatattgattttttttcttttggatatatacccagcagtaggattgctggagcatatggtagttatttttttttagttttttgaggaacctccatactattctccacagtggttgcactaattaacattcttaccaacagaatgtaagcattcccctttctctacatcctcaccagcatttgttattacctgtcttttgaataaaagccattttaactggggtgagataatatcttattgtagtttaattttcattactgtggtgattagtgatgttgagaacttttacatatacctgttgaccatttgtctgtcttcttttgagaaatgcttattcagatcttttgcccatttttaatcaggttgttttttcttattaagtttgagtttcttctatattctgtttattaatcccttgttggatgggcaatttggaaatattttctcccattctgtggattgtctcttcaatttgttgattgtttcctttgctgtgcaaaagctttttaagttgatgtgatcccatttgcacatttttgttttggttgcctgtgcttttgaagtctcactcaagaaatttttgctcagaccaatgtcctggagtattaaagactatgtattagtaaaattgttgatctgcatagaataaacaaactggcttgaaaagaaagcagcacttttcttaagggctaatgcttgcctatgcaaattaaatgattaatcaaacacattatcagtaataacttttataaaaatcactactcctgctattttctctactattgtttttgtgccaaaagtacatatacagctttctacattctttccacctgatttaatatatcaaagctgatctaagtaccttctcctgttacatatatgttacatattttatttataatacatctctttttgcatgcaaagatatgcgaaatagagtaattggcaatattggactttggtccagttggtttggaaagtttttgtgccttcatgcttattctttaagcatcgtggatgcatttttaaaatttttctctggatgcattataagataatggtatcaactatttttctctaatagtctatctaatgacttgatgtacagacagtctctgacttacaattgtttaacttagagtttttgactttacaagggtgagaaagcatgtgtattcagtagaacccacactttaaattttgaattttgatttttttccctggctagtgatatgcaatgcaagactcccaagattctgggcagtggcagggaggtgcagcttctagtctgccgcatgatcacaatggtaagcaaccaatagtctccaatgtactgtgttgtcagatggttttgcccaactataggctaatataaatgttctgagcacatataagatagtaggctaggctaagccataatattcagtagatcaggtattaaatgtagttttgacttatggtattttctttgtttctttcgtttttttttttttctttttttgagacagagtttcactctgtcacccaggctggagtgcagtggcgtgataggggctccctgcaacctccgcctcctgggttcaagcaattctcctgcctcagcctcccaagtagctgcgattacaggcacccaccaccaagcctggctaattttttttttttttttgtggagtcttactcacctaggctggagtgcagtggcgtgatctcagcccactgctgcaacatccacctcctgggttcaagtgattctcctgcctcagtctctcgagtagcagggattacaggcacacaccaccatgcctggctaatatttgtatttttagtagagacggggtttcatcatgttggccaggatggtctcaatctcctgaccttgtgatccacccgcctcggcctcccaaagtgctaggattacaggcatgagccaccacactcggcataatttttgtatttttagtagagatgggattttgccatgttggccaggctggtcttgaactcctgacctcaagtgatctgcctgcctcagcctcccaaaatgctgggattacaggcatgaaccaccgcgcctggcccaacttatggtattttcagcttacaatgggtttatcaggatgtaaccccatcgtgaatcaagaaacatctgtacttctctccactgatatgtgcatctctatcaggtatgatacagtaaaagactgtgattaatgatataagttcattttcatgatcagatttttaatttgaggtccttaaaagatctctagcaaaccctgagttcttcagaacactatggaaaccacagctgtaggacatgggaaagtgagaggcacacacagatctgcattgtagaatgaaatctcctgtcataaaatggaggatgagttagttaaagaggggaaatattagaaccaaagagatttgcaagaaggttattatgtaagaggatggaaaattaaactttgatacatgtcctgcacatgtaccctgaacttaaaaaaaaagttggaaaaaaaaaacttcgatatatgaatcaggaaaaaaaaatgcaacatttgataaataaaattgattttaaaaattagacaattgttagttatcaggactgatgagtaagaagagatcgttgatggctttttgctttggaaactcaggcaattaatggtgaagctgctgagatagacaagcatgctgaagtcagaggtacgtgtttaagttagtttacagtaaagtggatgaagagtttgattttacacatagtgaaactgagatactaaaaacagctaagtgcagatctagaattcagaagaaacattggggctgcatatgaatttgataaccagattgacaaagcttacagaagtggagccaggaaagaagtggagactgaaaagagaagagggctaagggcaaacaaaccctggggatcatgacctgttatggggcatgtagaaaaagagccaccaaaagagtcaggaaagctaagttaagcaggagacagttaactttatagaagtatgcaaaagagagacttgtaagtagaaagaagcagcaagtgtcaggccataaagaaatgcaattttgactcattttagtttttttcctcttgttaatccctatgcacctctactttctgccatcctttatccaataacaatgataataataataatgcctcagtaaatgattttactcctacttcacaaataagtttgatgccatcaggcatgacctatttcatatccatcatctttgccttcacaacccttctcctgcatgagtccttccctttctttttctattcctaaggcatctctgagtcctttcacttctttcctactcctgactttgttctcctgaaggcctcttcctttatttcttaaaatatgtatacttctcccaacttacactggcttccttgagcctgctgctcccaataactgtcctcctttcttctttctgagccaactccttaaaagacattgtttatacccactaagctcatctatctcctcccattctcttctgaatgcctgctatctggctttacctctatcccactattaaattcctcaaaagctatcaatgacttccttctagcccagtggtcccaacctttttggcaccagggaccagtgttgtggaagataatttttccacaaaccaggggcaggggggatagttttgggatgattcaagagcattacatttattgtgctctttattattatacaatgtgctataatatagaatcaatagcagccctgagtttgttttcctgcagttacatagtcccatctggaggtgatgggagacagtgacagatcatcaggcattagattctcataaggagcacacaacctagatccctcacatgtgcagttcacaatatggttcacgctcctgtgagaacctaatgcagccgctgatttgttaggaggcagagctcaggcagtaatgtgagcaatgaggagtagctgtaaatacagatcttcacttgcctgccactcagctcctgctgtgtggctgactggtactagactgtgacccaggggttggggacccctgttctagccaaatcctttttcaatttctaagatcaagtgaatcaacttcaggccccattttaaactgcagattgaccagcctatctttaggtttctgtgtcactgcctcattcagatttccttcctgtctctctgccagttttctctctcctttctgctggtgtttcttccccatcttgtctccaactgtaagtattccctgtattgtagcacttgggctcatttctcactgtacatgctgcatactttcagataattcatccgctctgctagcttaaattgccctttctattacaatgtcgctcatgtttatatctcctgttgacagaatgattacctctgtgctgccatccctcttatgccatccatacattaaaacaaccactaattcacaaagcaatcacaaccttgagaaccagtcaagtatgaggccattgccattgagttgtttctcagagttcctaaggtctccgcttagaacagcagttctcaaacttaagatttcatcagaatttacctggaagtgttgttaaaagacaagttgcttgactctatgcccagagttttctgattcggtaggtctgtggtgggtccaagaatttgtatttctaacaaatttccaagtgatgctgatgctgctgtttcaggcacaatgctttgagcatcactggcttagaaaacggtttttaaacatagctgcacaacagaatcactaggatagccttttgaaaattactgctactctggccaggcttggtggttcacacctgtaatcccagcactttgggaggccgaggcaggcagatcacaaggtcaggagatcaagaccatcctggctaacatggcgaaattccgtctcaactgaaaatacaaaaaaaaaaaaaaaaaattagccgggcgtggtggtgggcgcctgtagtcccagctactcgggaggctgaggcaggagaatggcgtgaacctgggaggtggagcttgcagtgagccgagatagcgccactgcactccagcctgggcgaaagagcgagactctgtctcaaaaataaaaaaaagaaagaaagaaaattactgctactcaggacccactactggcctattacatcaaaatatctggtaatgggctccccagttaactgtaacatgcaatcatggttaagatacatatgtttagaagcagaggaaaggaaataccactcagaaaagcaatagccttgggtaggggtttgccccatggtttcctccaaagtccattaattccataaaataataagcaaaagggtcgtgtgtggccagggagggagtgcgtagccttcaacatattctccaaaggatctgtgactccaccacccaaattaaaaatcactaaggaagctgattcttagggaggcctggcctgcttacacaatttcttacattcacacacatcaccatcatatattgtttcaaactcccttctgttcatacattaaggcttctgtgggaaatacctgctttactttgcatagcttcaaggcttgaaatgtttatccttgcatattcactcaggttaataagcatttgtttctaagtgcttattaagaagaagaatccaacatccatccatcattgacatgttggcaagaatcactttatctaggttggttttatattaccatatgtcctaaagtaataggtattttgaatgagcaaagaagggagtatgaagaacattgacagtctaagtagaggcccacagagaagttttcaaaaaaacccggacaatggtaacctgaaagattgagacgggtatctgaggcagtaagatatgtgtgaagaaagaaaaatcagaatacacaaagagtaatttttaactatggtacctgaaactcattgtacgatgaagaaacgaatagaaaatcatcttccttcttcttttcttccctcatgttcatcacatacagattcctcagaatcattaactaaggattaacatgatctctactagtggggtcagttttgagtaatgtaaagcatgggagccttagagccaatcccagctctgccattcactgtctaggtggcctcgagcaactgttaacctctctaagtccaagtttcctatctgtaaaatagcaatgataatacccgcctcatgaggttatcttgaaaagtaaatgaaataatttttagtacttattacagtgcttcaaactaccaagtgttcaataaatggctgttactacaactcagctaggttatgatcaaataggcattttttggactagcctaaaaatgcaactatgtatcaattgctattttctatgtcccaagtgattggctttgagatagtcttcactatgaaaacatttaaatactcactttacattttcaatttactttttaaacgaactacttgttgttccaactgccaatactttttgtttagctactcagttaccatcttaatctcacagctaatagaaacttctccccgaaatgagagtttcttaggaacaaggatcatgtctttatcaaataaccattaattgagcatctatatgtcaataactggacataaaaagatacatacgattagttcctttcctcatggggtttaacttctacctgggaaaaataatatgcaaatacaattcaagattatgactgttataataaagatgcgtgccaagaactattgagtctactggaagaacagatttattttatctcatttgataaggaaatcttcgtaagagaggtggcattagaactgagccaaatgtatatcaaactcaataataaatgaagtaattccagcactttggaagacagagatggaaggatcacttgaagctaggagtttgagacaagcctgggaaacatagcaagacccctgtctctaccaaaataaataaataaaaataacattagccaggcatggtggcacatctttgtagtcctggctattcaggaggctgaggcagggtaatcacttgagcacaggagtttgaggttacaatgagttatgatcatgccattgcactccagcctgggtgacagagcaagaccttgtatcaaataataataataacactaataataactgtaaaacatatgtaggaatagagagatctgcatgaatgctactgcaggacaagattcataagtgtactatggtaattttggaccttgaatacataggataaagataaaagatgaaatgtcatggtgtgcatctaggcatgtatgtaatagtaagaaatattattaataaatagcaagctggttgatgggaaataatgttagagaggtgctaccaagaaactgtattttgtagagccctgggaactgagcagggaagtttagacctcatgcaataagcaaaagaaaaacaaaaaaaaaaaaaaaaagaaaaaaaggcattatagattctacaaccaaggtatatgtaacatgatgaaagctaagttgtagtaaggttattccagctatcatgttgtgggtaaaggatcgaggctaaatatggtagactagagcatcttgagtcaattttattaatgcagctatgacctgtggtaggtctagacgagtacaagtatgtgtttagagatcaactatagatataaatgtgatatttcatgaatgtcacctgggatatttgaataataatatcactgacaaatattgcaaaggtaatgggaaagattatgaatcatttttaagtgaataaaatttagcatcatctttatgccaagtatgtgaaaatatataatatttcaggtatatgtatctacataatatgtgcatcttcattcagtatctgtttcccacagtatatcttgtttccacaaagaaattatctacttctgctgggcggaatctcgtctcatatttctcatgcattctacagagcctaccgtgtaaaaaacataaagttggtacttaataaaaacttatttgattaaataactgaggtcagaaatagcagaaaactagcccatcttagatggagtcattagtgaataagaattatttattcctaataatattgatgaagtggcaaaagttttactgtgccaagtaattctagacaataaaactatagttcattttttttttaatattcagtagaacaaattttatggacctgaaacatcaagggaaatagggaaaaatcacccttctcatctactcaggtttgcgtaggtttattttttttttcttttttcactttaaaagtgtgatcttaggctgggcctggtgcctcatgcctgcaatcccagcactttgggagaccaaggtgggcagatcacgaggtcaggagttcgagaccagcctgaccaagatagtgaaaccccatctctactaaaaatacaaaaattagccgtgcgtggtggcaggtgcctataatcccagctactcgggaggctgaggcagagaattgcttgaacctgggaggcggaggttgcagtgagccgagatcacaccattgctttccagcctgggctacagggtgaaaatccatctcaaaaaaaaaaaaaaagtgatcttaaagttggagtgggagaataagacagtaaatcagcccaatcttttatagcagcatattcacttcacttagaaaaaataactttaattgcacagggatagaaagaaagatatttgaatacctttccttgacaagattcagagctttcatgtaagaataaaatatacatttacagtaaatttagatttggggtagaatttaaactcttgtccatcaacatgtaatgaatgaatgtgacgcttgcataatagcattttttggagcactgttagagcaagggagtcttcgcaatgctaaagaaaaaaggaagttaaaaaatttaaggatgtttcactttcaataaaaaaaatcctagttgaaataagttggcaactccatgttcagaatctatattgtttctctaatgttcaggaatggttaaggcaggaaagagaatctcaaggtcaccaggaatagtccttagagtattcttatagggcttatctgtgctcacatgcctaatttttttccaagtgcaaaagaatggccacttgcttgagacaggcccagtgccatcctttattcaagttcctttatactcctctttttaaagaagctgtcaagttctttttttgcagttgacaggaaaggccaaatctgtggtacaggaaaggaggcgcaaaaaagaaacttttttgtgttgatgttttactaagtgagctaaggagaattttagaatcatgcaatttactctggaggcatttactgtacatagctatagtgatggtaatttctttcattgttgaagtgaaaagataaccatcaatcagttgtcaattggtcaattgcagaagtgatgaaaagaaactggtaggaacaatcacttctgtggctacctagaccatttggaggcataagaaaagtatgggaactggattgcattttaaaaagggattggaccagattttcaaaaaggttaataggcataacttctttgtaaaggatggctttgcagttatgcataatcaggaaatgcattttaaaaatgaaaaattttaaagacaatgaaaagtttaaaagtaaaaattatttatttaattagatcaggtaaataagcccagaagaccttgaatttcagtgtgttcctaatggaggaataaatatagtttactaataacccaacacatgtatttaaaacaaattaatgaaaattactttgcactcatgccttaggttctaatcttggacactttgaaataaataactttccaagtatttattatgagaaatagaacatacaagctaattgtgaacactgtttttaagcaaatatttacagataatttaatttttttgaacctatggaagtttatataaaggttaagataagagcaatttaaaaaatcattaacttgcataaaaggcaaatggcacacttagggacttagtgctgtaagcaagatttcattttaatttatcctattttcctaagaatggcaatgttattgatttattctgagagagttccccacacacatagtgattttttttttttttttaccgtggtaggtaataaaaaggattacaggcccccagaaggatgagatatcatcagtttgtaatccagcccatggtttcctagataccgtattgtctattctgttccgctatgtgaaaaatgttgaatatcaacaatgggtttcagtgctgtattgttgagttttgtatgaactaatctagcttctctaaaaaaaaaaaaaaaaaaaaaaaaaagaaagaaaagaaagaaagaaaagaaagaaagaaagaaaaaaaaagaaaagaaaaaaaagagaaccacagctttggacaaaagtctatagccagtgcatttgaaaactccccttgcaccagggctgactgtagctgggggaagacattttactcatttgctctttcctttcatacagtcagctggtccctcttctcaggtgtagatcacctattataattttacctaattttgatactctgataaggaaagtcccaggacttatcagctgggataggcctcacttacaagacagctctgttcagtatttggaaggtaagctatttgcacaacttctctgctgtagtgtactggcctagctctaaaactttgcagtacatcacttatttttaactttcactttttttctcttttcttcttttggagaaagaaagcctgacaggtttcttcggaaaagtggccatccatggaatgaatgaaatgttctctttctattccagtaagtaattgacttgtaactaaaaattgaactagctgctatgtcagctgcaatgtgagctgctgctggcacaggtgttgcttactctttagcctggaaagaaaaggggtttaaactgtgattaaatttcaagtcaattgacctcaacatgatagtacataattctcacttgcctaccaaatggcctgagttctcattttgaccctgattctgacacctgcgtttttaatgtttggtgtagctaaagctatggttgctcttttgtttagaaataaagtgggtagagaacagttctaagtaaataacaaatggtagccagccgaatgagtctttaatacagcgctcaacgtgttcgatttttttaatgcattaactctgagttcatgtaaattattattcaatcttttctttttaaacagtatggatttatgggtaacaatttactaactatggatacacagtaaatccaaatcagtgaattacaaataaggaaaggatgtgagaattttgatgttaagtgctttcaaattaactttgattatgtaacatatcataggcgaaatatgccttgcacttcaattatttttgagccctaggaatgaaatagcagcattgtttttcttccttagtataaatagaacaaaagtctccttaacttaagcaagatgaccgtatttgagtttgggagacaaacctttatcttttcccaaaagcaaaataaaaatcatctaaaatttagtgacatctaaaattacaatttacacttaaggctattctccattcattttttgtaaaatggttgcatgctaaggattgatctgtaagatgagagcacccatggattgttgttttttcctcctaacttcctttctaacctgggaattaggagaacttgctgatgatgcttgcttaaccctgcttttagtgccaggctgtaactagctctctgtgaaaccatttctgatcctctgcttgcagtggtgagcctgaatttttccccctcctggcccatcactgtcagtcaattataagattgaactgaaccagaaaatctggtacagtctggtaattactacaaagggtttccagtctagtgtaaagacagagatgcaagagccccagcagtctcagaaatcgttttgattggccatggacattgccttttagtgctgcttggtgacttcctaaagatattgcctcctaccctacaggtcttctccttcaagtacattatgggccttttttaaaagtcgtgcgtgtgtgtgtgtgtgtgtgtgtgtgtgtgtgtgtgtgttcatgtgtgttcgtgtgtgtgtgtttctttttttagattcaacttctcccatttttagtctgtcatttttgcctatcaaacagacacattttgacttgcccaacaaagaaccaagttatcaacactcacagaaactgacatttttaattcaggcttcattatgtctttgaattatgacagtgacatacaaagacattttaagggtttttcattgttttttaaaaatccagcattgggatgtttatctttctttagtattcatatttccctttctacctttattctcagtaatatataattagcattatcaaaaccatcagctattatcctttctgacttttgacctttattttttaaataagcctcaagctaacattctccagaataagaaaaattccctaacagattttaatgaaatattttaggattattttaaaacatgaatcccttttaaacatcaacactacatgactagacaagtaatgggtcttacgataaaacaatagcaacaaaataaatttgatgaaaaattattttgtaaatctaacttgcatttgatggtaagtgcgattttatagtgtgtatttcatcagacattttaaaccattactttggagttctttgcttattatgaaaggttgtttggggtaaattcttattttttacagaagcaaacattctttttgattatagattacaacgactcattagtcatatcagatatagtgaaagtgtttggtaatttgtcgatataacaagtgcctatcccaaaagatagattatgtctatcttattttttttaatttgctttaaggacaagtttaatgtctgacaccctgcacaaaattgcaaaagcagcagtgcccaaaagaaaaacaatcaaaagaaagcacagggttttcatctccaagaatgctatctttaggacaatctgcatcatgaatttagttgtgatgtgtgttgtgaatcttctaaaggatcctttatttatctacaccttaatgtagctttaaatatctgctttatttctatgtataatcttaacaaaagtagttacattaccatgcctggtactgatttttacatctgactttttgctgttacatttcaagaaggttaatattgcttttgtaaccctgtcatgagtaatgcattttcccagtaaacatgtcataatgttaaaggctgttcaagaagcagtgtttctgttgaaacagttttgtatttatttctctattgtttattatccataatatagtgtaaggctttgaaaagaacacgcatatttatgtaattaacactttttgttattaggaaagccttcccattaaaaactaagagagtctaagaaaactatataaatgggcaacttttcaggaaaaatatttgcattcgattttaatttgccatcaagcttatatgttaaaatgtatacataaagtgactgagggaagggtactttctggtgttttttttcttattttttaatctaaaatatatgttgaaattcaaaaggtgttcaccacatgcagtgtggcagcgttcaatattctttaacagctgtatactgtgtgggtctgtatgaagttacaggggctcacaagctttataacggacacaaacattcttttctatttcagtcttaactcctagaagcaggagtaagacttggaaagaaccaagcagcctcctgccccactgagaccagagtacctctgctattatctgctgtgtatattagagttccattaagatttactcatgaaaatcccatgctagaaagaaaaagtgaaacattactgactgaggctatcttatagaaaaggaaagcagggtttactcaaggttgtacactgagtgagtgacagtgtcaattttatcacccagtttcttgtctcctggtcccaggcttactctcctaaccagacacagtcatggctctgtatgtccaggcctcctaaactatattgctaaaagctcacaccaagagattcacagccatatgtttaaaatcaggatgcttcctgaagatatagtatctaggtggtaaatggaattttttaacattatagaccaaaatcaagccctttatttggcaatattattcattctggctgcattgttgtagctgttaggtaaaagattgattcctcttacttcttagtaaagtaatattttggaggtttcttaatggtatttctaattgtggtaaaaaaataaaatttactaccctcaccatttttaacggtatagttcagtaatgttaacttaagtggtattttttacagtagaaaaataattagtacttaaatccaaaagaaagaaattttttttaaaaaactgaattaagatgctaatttttcaaaacatgttttatggaataccatccctataagctatgccagctaaaaaaaaaataacacggtcaaataatttatgtccttctctaagaaattcacaatgaaaatttgtacttgaaaaactctggtaaatcataaagatctctttgaaccttgtataatatagtgtatcccaaactatttttccataggtttcccccaacctattttgccaaaaagtctatttttattcttcagagctaatatttttaacacattttaggaaattttcctctaatccaacctttgcagattaaaaaagatctataaagtgatgtttatactatttatgttcactggctctgtgtttacaaatcttttatctttatcttatggtagtaaatctcattaattcaatcactcaacaaatatttaggcatgggctaagtgctgggaatacagtaatgagtaaatcagtcagaacccctgaccttacagagtttacagtctgggaaagaagtcactgaaagtgctctaatgtgaaagtcagaagaagggaagaaagaaaagaagaaagcaagaaagggaggaaacaaaaaaggagggagggagggatggagggaaggaaggaaggaagggagggaggaagggagggagggagagagggaaaaggaaagaaaggaatgaatgaatacaggaagcacaagcaatattagctgtttctaacacttatagcttatctggctatgttttttgttgttgtttttcctcattctgaaatgagagaagagggaaagggggaaaaactccatcagttcagtggtctggtctttgaatagagatagaaataatatttctttgaaagctacgtatgtatcagcaattgattctatgatagttctctagcaattcaaagatgggcttctattgcttagaagggaaggagatagaaagagaaggagagaagaaaaggagaggaaaggaggaaggaaaaaagaaaagaaaatgcattttctggtcttccctcctattgtggcatcttagctgttgatgttaccttccatataagaagattcctttcaagcgtcagcagaagaccttatttgatggtaaccatgggtcctacctctgtcaggacatattgcttctgactatctatccatccttctctctcaggctctgaccttcatgctgggaacctttcttcatgggagtggaatgtgtctcctaagcaaaggaaaaggataggcccataggcatatcattgttatccagcatcttactcatccttagagctcctacacaaaaatacaaatcatgatcctgccaaaaaggagcacttgaaaggctgaagaagggcctcatcttcttgttggactgttgtccagtgttccacttccttgtatgaaactgaatgccttgcatcctaactcctgtgtataccacttgaaaatacatattgtaggtgactgccctttgatcacagagattagggaagcaggaaagattgcaaaatctaaaagaaaaaaaaaaggcttataactaagagaaaaagaaggaggaccttatgcccactctggtttgttacctgcatttttcatcatggatgtgtcacatgtgagttctgtgaatcagtgctgagctgaattctctgggatattgcaactttgttttgctttttctttctttctcatcccagcatttccttcaatgggaacaatgtgacataaaattattatcagaatactgcgaggaaaagaacttagaaaataatttggaattttcaagttaaaattaagagctgtgttagtaggcttccttcctctagttagctgggaatcaattttctaattcagtctctcctctctgtcatttgtctattgatatatgctaggccatgcagtatttgcctctttttattccttttaattaactttttaaaatcaattatgattatttatatggattcctattctctcttctcatcaaatttgtttggcttactttttatttacatgccactacccactgctgtgaattaacaataacaaaaaatctgcactcttcccttccacctcttgaactggagaaacagttagctaataagaggctaaatgagccttagagtatagagaagctggaatccttaaattatttaaattgaaaaatggctggttttacaatcagaaaaactcaagtggaccgtaagcccctacttgattgttcccccttatctggatgatcttgtaatgacagctggagttatctgccatcagcatcactgtccacaaaagcttctactctctctgctcaactcttcagcagccctggggagctggggctgtttcaggggagagggccctagaggattggaaactttattaaaatgcaaagctctctctagtgacataaaagctcagtaaagggtaatggatctaaaatcacagagccagaaattatctgcagaatgaaaaaaactgagatttcatatactgtaggctagggtcagtgtaaaataaggggcaatataaaataaatagcagtttaaaataaggagcaagagatagaaggaaaagaaaatgtagtgtttcaacatcaatagtgcaacaaacgccacatgtgtcagactggcccttgtagaattctgtctcaggaagtgacccaatgaaatgtattatgggaagtcaggatagttgtctgctttgaaagtttagagaagtgcccccaaaccttcctgattttctcttgataagcaattcattcttgggctaccacccattaattttctgaaacttattgttgctaatagaattggtagtaacagatagtaataggaccccatcacacttttgcttgacatctgaatgtgggctctcccttcactggccttatgaaaatgaggaatctaattcacaaactgtatattttaaatgtatttgctcattttgatccattttactttaaaaattaaagagtaagatcttaattcatttaactcaaaggactccacttaagattactcactaataagttaaatgttgaaatgaaaattgaggcactaaaagatagaacaattatataatttgtcttaaacaatggcaattagtagcagaatgaaaaacggcatccaggtgatttcagtttgcatatactaaattattcaaaaatcctttattttatattctaaatttcttactagaaaaaaatgactgtcagcatgaaaaagtcataagtaatattcaaaatagcccattgctcttaaaaggcagagtagtatgttcccttctgcacattactactttgaaaacagttctcagggaaatttattatcatcatcactaccctgacaactacctaccgacaatcatttattgagtgcttaccgtatttctcccttctccaggtcttatcttcaagcctcgttttcccttctgctcagaactttaaaaaaaaaaatcagtgttgggttaaattacttaactgataatttctcttttcatgcaactagcaagttcagttagcaaatgaaaagctaaatgaagtattcattccttcatcttcagcagaagacattaaaattaccagtcagatcacaagtacttcatgtatcaggagaattcccaccccacacatatatataatgatttggcttcattttttccaaaaattttgtatttacccttcacacatttaaaaactgatttttagtgatgagaaaaggttgatagaattacttaggacttttttttttcatttttagtgcagagatagcttcaggtgtgactttataaacaagctttcatctccaatgtaagaaaacaaggttctctctgtcccccgaaaagagactgggtactggaacacagagaagctcctttgtctgggtctccccttcaccctccattagtatgcactgctgcaaacttgaggcacagtgaagaacttctttgacttgggagggtggtttttataaaaccccaagctttgttccacagggacactcatgtcaaatagcagtcccccatagtaattgtaactccatcatattctcccattcaaaacagtgtactggggtatgagtgaaagcaatactattgcaaggataatcttgaatttgctgtaattcattcttaaatatattgtctgcaaacaccagaactttattattatttcatacttcttagaacagatctcaatcacagctgatcatggcacattgatctcatgaaactggggttaagacatatccttttagtgaaattggcaactaaattggcagagctactaagaaatggagattcttagatctgtggagctgagacttgagaaggtactctgaccaaccattggctcttgagactatttcagcaaatgattggagcacatcatactgcttttctccttccaacctgatgtctcctcacaccaggttgactcaacagccttatgtttatggagcaagacaggacagagttattgtttaccttaaactaggatcgaaataatcataaaatgccgaaatatgattaatagcataaaactaattttatgtgtcgtaactaaatttctgtctttttactaattgcattattggcatgtgttagcttaggctttatgttgaaaactaaattatttttgaagtttttagtgttcaaagtgtgatgattttctggggaattttttcaaagcccagtactgagactatgctccagacaagttgaataagagcttctgaggatgggacccagacatcagtattttttaaagctccacagattattccaaagtgcagccaaggttaagaaccaccagtctaaggaagggaaaaaggtgggagaagggggaatcagtatagggagatattaggaaactaatttagtcatgcagttataattggtgctattttgatttgttaacctgatagtctgagagcatccaatgaccactagatgagcctaagacatccccagttatcactccctgcttctgtgcatctaatcctgtggagatttgtaatcctgggaaccaagggcaggaggaaactgtgacatctctatagctgcaggattctttgctctttaataaagtcagggcaagcttaatcccacatagttcatagggaggctcaaaatggatggaggaaaacctgtctctatccctctcttcaaaggcaggtacaaataaagagtcctaggattactgcaaatttcctaagaataaaaaacattcagacaagagttaaaaaatattacagtgtctattgtgagcaaagtgctaacctaatccttactacaactctgtgaggcaggtattagatgtgctcccattttacagaggaagacactgagaaacagtaacaagaaagctgcccaaggtcatacagataatgtgtgcctaagtctggactttttactctaagacagatggaaaactgaccaaaggtcaccctagctattcatggacagctgtctgtgtcaaaagaatcttcctttctttagataaagaatcaaattagtatgctaattgtgttctttgctagtatgtgtaagcaagcattatactcacagacatggaaaagaaccttagtattcagacatcagtatggcatttgttgtcttttgaaacatcaccactagttctcatgaccaatttgagtctattggagtttcttcaattaaaaaaaaaaaaaaaagttggaatagctaagataacccagcatacgcatctaagctcaagcttacatcaaaccttgaaaacagggtagaactcctccttataatatttctgaaaatggaaatcctcttgacttagtagtgataaaaacgaaaaaaaattttgtatgttctccctctaaagtcttagaatttgatagtgtaattgggatgtggcatcaaccccaaacagctgcagctatctgtttcatattttgtaaactttttctgaaccagaaattgctagttacctaagacagcagcctaaggtagggccaaccctcaaccaatgtgaagaaagcagtttatcttttatttactcaaccaagcgttgtcttgtgtctattatgtgctaggcactattcttccagatctttcccagcttactgacatttcttgtccctcttcctctcatgctcccaacatccgtatcccctgtccctgtaccctctgggtcaaaacccactctcagatacctcactcccatgaaggtaaatgtggttaataacagctttaacaagttattatttccaggattataggtattataacagggaccagatcatttaatctaaaagggtgatggtcttgtggtataattataggcaggggtttcctgaagacagttgaaaccttctccagtcttgcaactcaggtggcagcctatgactctcctgaggtcagggccatgcattttcatgtttttatttttatttttatttatttatttattgagacggagtctcgctctgttgcccaggctggagtgcagtggcgggatcttggctcactgcaacctccgcctcccgggttcaagcaattctcctgcctcagccttctgagtagctgggattacaggtgcccgccagcacgcctggctaatttttttttttttttgtatttttagtagagacaggatttcaccatcttggccaggctggtcttggactcctgacctcgtgacccacctacctcggcctcccaaaatgctgggattacaggtgtgattcatgtttttatcccaaatgcttggcacagtgacttttccagttggaactcaataacgaaggaagctctggcctgaggaaagcaagttgcaataataaagatgtcctgacacagatgaatgggaagatgttggattcattttgagccaaactggtatgaggaggtcagctaaaagcatgaagaggagataacctagtcccatcaattgaattctcctaggagccagggtcagatttgagaaacttctggaggatccagttagctttagaagctgtagatctggttttacttagcagttctggtccattttaatttgttacatttgcgtttcactgaaattggtataaaaagtaaataaaacgttcaaaaaatatttattgagtacctactatgtaccagaaatgtggctaggcattgtggatattgctgtataaatcccaattcctgccctcttgaagctaacattctacttaaagaaactgatatgaaaccattaattatataattcagtatttaattggagtcatattaaatgctacaaaggaaaaatgcaaagtactgaaaaaacacacaacagaaggatgtgatctaatatagaatatcaggcaaaccttctcagaaataaaaattatatatatatatatatatgtatagagagagagagagagagagaaaggaatataaagataaatgaggcatatctttagagagagagagagaggaatataaagataaatgagacatatctttagagagagagagagagagagagcaagagagctgatacctaaaagatgagtgggagttagctaagcggagaatttataaatggagtggacatttctaataaacacctttaacattcaatacgctagagctaattctcagatcaatcttcttgctaacaattgtcttggttccttttcttgaggttgttcacataagaaacattttgaggtctttgtgacaagctgcttattctgggctctaaattcaaataaaacattggcatagagaaataaatcatttccatagatgtcaacatctttgtgagacacacaagtgtattataatctcacccgttactgtttcacctaggtcgttagcatgaatacccatttgagataccccatcattacactctaggccagaagctttcaaattctgaaatgtccacagacaagactttctatttcactctgtccagaaaccttgagtaaaagaaaaggaggtaggaaaaggaaatgagtcagggaactgaaaacaccagagagagcccggtctgtgtaagggatattttcaccatccccaccctgttaactcagtacttcgtacgttcacaaaaagacattcccaagttcgtcatgctattttatgcagcaccttcccttggcccgcttcttcagctaattaaattctcattcctaaaaactcagttctggcatgttatcctcttaccccactgtcccagtctaatttagatacacctcctttgtgatctcatagcttgctacgcttttatatcttatggctgtataataataattgatttacttatctaacttatcttcttcttgagagaagtagttccttgagggcaaggctcatgttttaatcatttttgtacccctcatttctagcagagtacttaaaaagaatcctttcaatgacttcatattcatgcatgatagttacttttccttccttagcccctagagagacatggaaacttagattttgtttatccagtaaacaaggctggttttgtatgtaggaaacttttgacccatcccagtctgaaattcttctccatttacagataagcctattttagttaccttgactaaggtattgctctagagacttcctttgaaaaacctcttaataaaaaaacagaccagtctacatgatcccactgaccaatacatttgtcaggaacaaaattgagctgggcatggtgatgcgtgcctatagttccagctactaaggagactgaggcaggaggactcctttagtctatctctaaaaaaaaaaaaaaaaaaaaaaaattaagttaaaacaaaaaacaatatgggttttgatgttctatttggtataggacacaaccatatgtttaagtgtgatcttttagtcagtgtatttagaataatttccatgtttcatgttagaaatggcataatttgcagactagaagaaagaaaggaataaactatgtctagcagaatacttgtcaactagtaagatgagaaaaggaaaggatacattaatgaaggaataattgaatgcatggataaacacagtacaacccaaaagaatcatcaagccataagctagaataaggacttatcattgacaaaaacgacaaagccatcaaacaaaaaataaaagctattggaagatcacattttccagtcaaacaggacccagatattattcaaatacctaaaaagaaaagaatgtgtttttttaaaatactagtgtatagagacaaaagtttgagacatgaggaagaagtattataaattccagaaaaatcctcttcccacccaatctttcctctcacacccaccgctacacacacacacaccattgtgctatatacacacaagtcatagttgtctacttgcttttcctgaaataaccatgattagaaaaagaggaagttagggtaagagaaagttccttcccactgaaatttcctccttctattcctgcctatcattcttcaagataagcataaatgctacctcctctctgacaacctgtttttgatttactgtagcccccagctaattgctcctttcctctgcactaccactacagcttacctcatccctcttttgcacttatgtcaccatcttttattagagttagctgcgtacatctttccttcctctatcataggagctttggacaaggggctatgtctcatttatctttatattccgctctccctctcttccttctccattcctatcgcagtgcctggcaaaagtaagaactcagaaaatgtttgtgggatggaaggaagggggaaagaaaaaaaaggaacaaagtttatttctgaagaaaatgccatttgtctcccttctccaaagtattttctttttctaaaatcagggagcagcctttgtttttcccctaggtattagggtgtgtgcccttgaataccttactttggcaaaaagccaacattccatctccaaccagctgagtcattttcagtttttttgtggttcattcatgcttttctcctttattgacacattaacatttcatggtgagtaggtcctgttcagctggcagcccctctcagccccaacacctctaagctgtcctcacttcgctagttcccaattgcctgtctctctgggagctctctgtcatcatcatcaactggcagcagaagaattgtttgtttgctgttgctatacctatgttttgataattaacatgaaacaaactcagagaatgagagaactctgttagcagctctcttttcttatgtgttgttttcaaaagctcccagtttgtttttaagaaaaagagaaaaatatggataatgaaaacactagatagatctaaaatccgtttaatttgatatcttgtcaaaatccttccttttaaatttttctccaatacctatacatctattacttccatgccatctgcaatagtgactctcaatgagtttctagtttgctctgttttgtaggtcatcaatttgtaccttaacctaaaaaatagtattaatcctaggctaggtgtggtggctcatgccaatagtcccaacactttgggaagccaaggtgagaggatcacttgaagcctggagtttgagaccagcctgtgccacatagtaagaccccatccataacaaaaaaaaaaaaaaaaagtttttaaatttaaaatagcattaatccatgagcaaatttagtaattaaaaatctagtctctctaaagcatggcatacaagggttgttgtttattggtttctgagaggaaataccacacagaaaaaattatgttacaaggttacaaatttacctttgcatcttgcccgtagtaggtgctcaataacttcctgctgacagactgattagttttagtagctccctgttatttccaaatagacaacatttttcagacttttctgatccataatgaaacatactttttcttaaggctgtggaaatagaataattcttattgcgaggttatttattaccagccagaccctcatctcgctctacggggctctgataatcacctatttcagaagccattagccttctgtgtgttgtaaagcactcttcactataacatatctatgcctttgtattctaaggggaggaatggtgtgtactgaagtaacagacctctgttgaccaagtaagaaagtctttgatgcacaaatagtaaattaaattgcttttatttgatagtgttgaaattaaacagtgtgtggaatccatgcccaggcatgagaatatgtacattctttcaaatgttcaatattactgaaacagatgtataagaaaaatacacattgaaaaaaatgtaatactcactcaaggtttaggtacttacaggaggacagcaggagctggatttaacttattgattttagagccactgtttttttaaaaaagaggtgaaatattgcttttactgttttcagataatagtgactgttgttgcaaattataaaatttaattagctatataaatgccagaggaacaaataatgtgctattgtcttgatatctttccagaaattagtcttttaaaataaatttgccatattaatcatctaaaaatatttttgatcactgaattaatagtttgcagcctgttttcaggtactcattgccataggtgattgcttcttaattactacatgggctttttctattcactcatattaattcatgttttctggcacagtcccaaaaggcagcttgccctatatcttctaattacttctataattgaatttgcccactttttctaacctattttttaaactgactgtgtttgttcatggtttattgtgtcttttttgtgtcagttctctgcaagcagaatgtacattgattctttcctcgtttctcattaattttcaagagctttgctgcatgtctgttttttcagtctgtcagacctattgctagactccccccctcaaaaaaaggctcttattattaaaggttaggtaaaatagactgaagttaattaattcattagtaactctgagccaattactgaagccttctcttatttatatacttgttaacaagacagaaataagaaaggccaattacaggctcatgtccttcagaagttcagcaaacccagagcttatgcatttattgacatcacttcaaaaaattcagtttatatatcatatgtgtgaaatttctttttaaaaaattgttagttaacactctattctatcccttccattaataaattttagaggtgtttttctgccatctagatatcataaatatatctaatgttactacatcctcctaaaatctttctagggagtactgcttagccttagagcaattacaggaataaatttggcatattttctgattttcattattctcctcttgtctaaactattaaggttttaattcttgaaatgggacaattcattagcagatctcacaactgtagtcacttgacatatgttttactttttttaattgaatataccaaagatttacaacatgtggaaaggaaggtttttttatatttttcttcatgaccagtataaaaaattctaattgtctcatgcacacaaactacctgcccaatacatactacaactgtgacttccccttccctgcctcacaaatattttgttaatttcacaggagttaggaagaaaggggatggacacttaaccagttttctatctattgatactgtctccatatgttgatgtcagcatgaggccacaaatcagtgaagagtcacttgatgctaatgtttcagtaaattaattggttgtttgaattaaaacccatttgagtttttttttttaaacttttgaaatatgatatggatttgggttatcatagtacagtgatgccaaagtaatgtcacagttactgctacctaacttttagttttttcctcagtcctaggtatattaaaatttaatcagttatttcatttcataataatggcaatcacagcatcatcgagcaagaaaagtctcaccagattatttgataataatatcaatatttgataatgtccttgattcttggaaaactaatggaaaaatagttgtctacctaatacaggaagccgttcttaatacctcttatagcaatgtaaacactttcttgccccagaattctcatgctgtcttatttataactattttatagaacttttcactttctactatgcattatagtaactttctctgctgaattattagcaaattgaaggcagtaactgtgttttatgtactttgtagccccagaattttagcccaatgcctgcaaatagtaagctctcaatcagcatatgtcaaatgaattagggatgaggagtcctaatctctctttaacttcagcgtctaacctccctcactactttggctaactaaagaatctcttgcttgaaatcggttaatgtatcttaattttctgtggtaactacaatacattggtaacagatgttccattattaatgcattatgtaggcttctttgctccaagatttaaaatctgtattaatttttcctcagatgagctgtttttcattcctttaattactatatagctatatttttaatttcttatggctttaccgacctcaggtctgtgactttgggccaagaccacacaggcccttgttactcttcccactcccatgtgtggcacagtctctgtattttcagaaacacctatgagaatcggaaattagctttcctggactccttcactccttagggcttttacccaccaactcttcatgctcctgcttcagtgaggctagttttccttcagctaacttttgtatattatccctgcctttctttctttttacttcctttttctttcttcctttcttctgtctcttttctttctatttgttttttaaaataatatattttatagccatgtctcctaatagcagtgctttatatatttataatgagttccctgtgtagaagcttttgtcacagataacttctcacttgattcttacaggccaagttctatgcagatgaggaaactaaattcagagaggttaagtgacttgcccaaggtcacacagctaggttacaatttcagtttttacatttttaacttgttggcctccttatgaaaatgaaacacagaagagttccttttcttagttaagtcttatcttttgtgtaaggaaaatacctaatgtagacccccaaaagctacatttgtagccaggtgaatatttttccagtaattatatagatcattataaaaagaaaatgtagcctagtctagtgcttctgcaacttcaatgtgcatataggatcctgtgaaaatgcagattttgattcagtaggtctgtagtcctcatgagctccccggggagccaaagccaccagtccataggccttacttggagtagttaggtccaatgcacagagtagggctttagagccagagatgcttgattcacatcgtagcgcttctgtttactaaccgtgatcttgggcaagctccttcacctctctgagcctgtttcttcattcttaaaatgagaataataatatatatcttactcgctgaaagccaagctggcttgcagggaattgacttttagtgacttggcctgcttccactacacactactaccagattaatcttcctaaagcctctttcactcagaactttccagtgagccccatggcctggtgaattacatacacactcctcttccccttgagcctcaaatgtctgatgtaatagtcacaagtcatatttctagcttgatctcttcctacttcctactgacactcatgtgttactaacacagagatttcctgtttcatctctctgattcacttttgtcctacccaacccttcatcatatccataaaaatctcacccttccattaagtcccttctttcatccaggctctggctggaagcattctccctattgtctaccctctattgctccccaaaactcccacacatatcgagttaggtctcactggtatttgaatttttctaacagtgtgtttatatctctggacagtttctttacatttttatcttatattctagtatttctataatggtgtctaagttccatgaggatgtggatccgatatcgttcagatagcacagtggcaagaactcagccctgaggcccacagacctgagcatgtacctcaggtcagctctgccatttgccagcttgtttgccttagacaggtctcctaaaccatctgagcaaaaagtaggtgccagtaatacctaacttgcagttactaggaagaaattttgtattaaaaatactttacatggtatccaacgcacaggaagggctcctgtcagcgaaactgaatgaattagaactgactgtttaatcccaacacaactcagacattcattctagttgtgttaacactggattcaagcccagacttccagtttgtatgagtattttaacattttcttttccggttatgtttatgtcagtattaagtcttatcagaatattccatattctgcctcttgaaatcaaagcacatttgttgatctagctccaataggtataacttaaatgtgatgatgaaaaggtaacatagtgtgcttttattttaaagcatgtagtttatagttaaacctaggtttgaatctaaacctagtggttgccttaacctctccaagctatggtaatatctaagttgaatttgggattttttttaactttttttactcttaaaaataattagaggaagaatatatgaaatagaaaaatatttatagaaacaagtagcatattagttctacagcccaaaacactaataatattataatattatcatggatgagggggataactctaaacaccccaaatagccccccttttgtaagttgaatttacatatatttatcctagagaatttaagtattctgtttatttcagtaattggtaaggagcagtacatttttttaaacttcctatcagctaatttcaaaaagaactatatttaataagctatatcatcatttagtttaactttttggagaacaaaattaaacgattttaaaagtagaagttaaatgatgccagtgtaatcaaagttgactcaatgcttagacacagtgtaagagatgaatcaaagttgcatctgaacttagggcaacagaaccaaagtcacagctatagtcagtatgttgttttgttgatgtgggtaaagagggttttcaaaagaaaaatagaaaatggggcaaaccttgttttaatcagggagtatatggaaagaaaattaaatgcctatattaaaacctattctttcatactaccaataacatttttccttagcctctagagaccatcaaaaaacaatggctcataatgcttttagaacagaaactgaagttgtatactgtgcatatgtaatcctacacaagaggaaggcaatgtttaaagctgctgtcacctcttagggaaaaaactggaattctgagtcaagtatgtatgcattttctgttttcctgtcttgtgggtctttatgactaaaaacatttttatgaaattgctctctgcttctttaagctttgtgtggtcttgtttgtttgttctcaaatctcaaaccatgccatagttaggaaacatcttgagttgttaaaagttaaagaaattgtattttgtttatgagcaaaagagcaggccaagcaatgtcttcagaaacaaagatcttattttatttaaagaagttcctttttgttataagctagaatgaagaatgatttcaggacaatgagacagaaactacctcttgaaagctgtaatgttgaagctggctacatagctaaaatagagtagactgattttcttttctaggcctgtttggtcaatttaaaccatattaatgggtgatcaaaccctgaagagttctctgaggatttaagttaccagcccacaatatactgacaatccactgaacaacaacaaaacaacatttaatttcactttatgcagcacaaacgcagactgagacactctatcaaatggttaagagcatgggtttcaagtcagatccacctggatgtgagctctgggtctagcacttgctaaccatgtaatcttgggcaatttaacttcatgaattctatttcttcatctgtattataggaatgaggccatatttcatgagagtaagatgcattttttttcacattttaacatctctgatgttagaatgcatgttacaattgatggtgtgtcttcattcaattgccaacactttttcttttcttactagtacataactgtgtaattacaacctatgacatttgagattcaattaaataattaacatatacctcatagagttgttctgagatataaataaaataatgatgtagaaccttatgtcctataaaacctgccccacggaagacttctagtaaatcataccagttaatgttgtacagtgtgatgtttgtaaagtctggcattttcctgtcttgttagtcataatttctgtttgccaactctaaaagttaatttctttgcaaaaatctttttgttggaacagtctgcctactgagtagctcgtcaaatttcctctaattgttctggcagcatgacattgaccctacgggtttacatatgaaatatggtcaaaataaaggttttatgaaagtccatattgacttgtctgatgagttgtttgcagacaaaaagaagagtatgtagtgtgcatgcttcaacagtgcctggcccacaggaagcactatagaagtggtgttgagaggcagcagcatgcagggtggttaaagggagaggctctcgagccaaattggctgcgatcaaatcctggcttttccccttacaagctgtgtaactttggacaaataatctctctgtggcctccatgttctcatacagttgtgagaattaaatgagctaatatactgaaagcaattgtacaaaaaaggtgctagataagttttctgctactggaggaaatacacctttcttttatttaagtacctttaaaaggtctgaggtttttcatactgaaaaagaatattccagtaagtttacttttttttttcctttttgagacagagtctctgtcgcccaggctggagtgcagtggtgcagtctctgctcactgcaacccccactgccccagttcaagcaattctcctgcttcagcctcctgagtagctgggattacaggcatgagccaccatgcctggctaatttttctatttttagtagagatgagggttcactatgttcaccaggctggtctcgaaagcctgacctcaggtgatctgcacgtctcagcctcccgaagtgctgggattacaggtgtgagccaccatgcccagccaataaatttacttgtcaagcaggtgattgttataattctgactgtaagaggcttctagtgtataaaacacataacctataaacatgccattgagatatttgtgatcatgtggcacagctcttaaaactggtttgtctagcagtaaacgtatgactgaaaacaaaatatcagataagtctgagattgcttctaacagcctctagagtgtctgtataatattatcttgtatggcttaaaatccagttagtataggtcagcctatactccaagaaagggtcattatgcctaggattttcagaagggcttccttctagcatttattcactggtaacccatattgttctaattttttaaggttgcaaactggctgctatgctggaataactatggccatcaagcatgtatctctaagcatcaacactggtgcttagttggcttttaacttattgatcacaccttttacatatagagaacttcaaaatgaaataaaacttatctatagtttttcattatttttgagtggtaattatgtgttaattcagctgaacaattgcaattagtattatttctttgtaaccaagacacattttttacttttcttttctccctttgtttgcattttattcactctctaatgtcaatatcaagaaactataggctgggcatggtggctcatgcctataattctagcgtttggtgcagggtagggggcgccaaggcaggaggattacttagcccaggagtttaaaaccagccttgacaacatagcaagatcttatctctacaaaaaagtaaaaaattagctgggtgcggtggcatgagtctgtagtcctagctagtcaggcggctgaggcaggaggatcacttgagcccaggagttcaaggttgcagtgagtcatgtgcgcaccactccattacagcccgggtggcagagtaaggcctcaactcaaaaaaaaaaaaaaaaaaattaaaattaaataaaaacctatgtgtccagtgtgttgaaacattgatgtccagacaacttcactctaaagttcagttctgtcgctcagctcaccccctaatatccaatgagttaataataacttatgtgataaggttaataatagcttatgtgatgataataataatcacttaaaaataataataacttatgtgataagttaataatagctcatgtgataagggctgggtggccctctttatcctgtggctctgccacggaatacatgttttccaagaccaccttcacaggaagagcaagacccgaagcaacccttttgggagccacttccagaaatggcttacaagacttctgtgccccaattcttttggcacacatccagtcacaaggcccaaccaaattacaagggaggctaggaaatatcttccctagtgtctaggaagagaaaatcatgtggtgaatagcattttctccaccatagccatacagctgtgtaagttgggttacttaacctccctgagcctcagcttagatgataatacttaccttgcaaagcttctgtgaggattaaatggggaaaagcacttagcatgtggtaagtactttattaacttgttgtatattattactaataattaatagtttctccctaaacacacaaacatacacaggacccaagtcattagcacctgagcctctggtcctctttagtctgaccctctgctgaccctttagttcctatccagccggggttcaggacttaaggcaggcaagactcttgcccatgagatgtgactgtgactagcatcatactccaggagctaggatatgggaaatcaaagccaaagatgctgaaaatgaaccctagctccttcaggagtcttgggggaaggactgtaaatacattaacgtggtagagaggagaatcatcagttgcgtaaaattatgcttaaaagagaccaagtcttaagatagcagctgagccagatgtattggctcatacctgtaatcccagcactttaggaggccgagatgtgtagatcacttgaggtcaggagttcgagaccagcctggccaacatggcgaaaccccatctctactaaaaatacaaaaattagccaggcgtggtggcacgtgcctgtaatcccagctactcaggaggctgaggcacgagaattgcttgaacccgggaggcgaagtttgcagtgagcggtgattgtaccactgcactccagcctgggcgacagagtgagacttcataaaaaaaaaaaaaaatggcaactgaaagaaaggaataaaatgaacacatattgatatttcaaatttggcaggcatcatcatgccaaggctttcacacaaatggcctcctttaattatcacaaggatccttaggtaagaatcattaaccccagcttccagtaggattaaagtaacacacccgggcttacatagctaaaaagtgacatatttaaaattgagtcttcagagtcctaatgttctttgttccatgacagcacttcacacctcttagtcatgctgaatcgtgctaaggatcaatagatctcaaggaatataccagaagtgtttcttgcccaggggaaagggaagtagacccattatcttcaagcaattctccttctcctacttcccacaagaccaaaagcgaaactcagaatcaacgtagggtacaatatattttagttaacctctcccaagcacagacaaatacacccttatctgtttgctaatgtctgaaattcatttcgctgagggaggttatgtgtatgtggatggatttccattaacatacatgtaagaccatacatctcatttgggtcatatagaagatggaaagattttactgagtaaagcaagaatttggatgaagaaagctttcaaaccagggccacagcttcctgacttcagtctgacagccaaaaaatggtccagatgtagtcttgagtcctctgtagccatgcaggcttagaatatggtgggaactggtcccatggaacagtcccatgaactgaactctgagtaccatgccataaagtgcccttaggacatccaaatatatccaaacaaaccaagggatttggagcttagcattttacaggaacagtattaaaacaaaactacatctgcagcagcaggagtgaaatgaatataagattaggttcttccaatctgtcaaaataaatttatctggaattgtgagcaatataaacgctgtaagttccagtctctgactctatttctaatacatgttaggattctacccactgattcgggcatgtataagaagtagtttatgacgccacatgcctcttactttcaatgtatttgggactcctttgtcagttctataaggtggtgacttctttacattaattttcatgaagaatacttagaacagtgttttcataatctgaaaggcaatacagcggagtggttactggttgagagtatgggctctgcggccagagtaactttgtttgaacccaggcttcataatgtaaaagctctctaactttgggcaagttacttctgtgtgcctcagtttccttatctgtcaaacaaggaggtgactagtgctgccttgtaagcttgtttcaaagattaaataatttattctatatatagcatgtagaaaagtgactgacatggtaagggcttcattctctagcaaggacctcaagaataagagaaaggggcaagaaggagacaagagccaagaaaccaccacagtcactgttaccatgcagcggaatggaggagaactagctaatatttgtctcaccagttcatgtctcaacagttgtgaaacagagatcagtgcttctcaaaattgaatgtgcttatgtcacctagcgaacttgttaaaatgtggatttttatccattaggtccaaggtgcagctggaggttctgcatgtcttctttttctttttctttttcttttttttgagacagagtctcactctgtcacccaggctggagtgcagtgtcgtgatcgcggctcactgcaagctccgcctcccgggttcacgccattctcctgcctcagcctcccgagtagctaggactacaggcgccccccaccacgcccagctaatctttttgtatttttagtagagacgggatttcaccatgttagccaggatggtctcgatctcctgacctcgtgatctgccctcctcagcctcccaaagtgctagaattatagacgtgagccaccgcgcccagctgaggttctgcatttctaataggctctcaggtgatgctgatgccactggtctgaagatcaccctttgaagagcaagagtttagagaacacctgttcctaaatgccatatggtctctttcttaaggttgagctctccaaggatctacttacgaaacccttttgttatttttggtcatgggtcatgagtcaagaaaacatttgaaaatagatgttgcttcaaggaaaatggcataggtatttgatattgcattaatgaaatattttgaattcttaagcatttggtcattttccccactcaggatccaagattgatttttccctttcagatcattaattacaaaataaaagattgaggttttttttaaggtaggcagaatatctccatttgctttccaaatagggatggaatcagcaaaagcaaacatcttcttgtcatatgatgactgtccccttcccaaacaaccagtcctttaattctaacctcatgcacatttcaagagaaatgtaaagcagatggttgtgttccactgatacataaatcacagaaatttctcataaattcttttgattgttaaaaagcttcaaactgccaggcagtgttttgcttaaaccaaagatgggcctgagcaaacagctaagtggaacagcattcaggcttgaaaagcttaagtttagtcagatgatttccttgctatctcctatagacactttttcatagaaattcaagatatgcgaagacttgaacactgtgtgtgtgtgtgtgtgtgtgtgtgttttaaaatgtctacaagcgaaatcaacaagtatcattcctgttctcgaacagcagagagacctccatatcccaccaagttacttgtgacagattgttacttactaattccaccaagatcataaagcaatgccttacagtaagagttggcaaactttttctgtaaatggccagatagtaaatattatagattttgttgctcattcagtatactagtttgctaaggcagctgtaataaagtaccacaaactgggtggttaaaagaataaaaatgggttgtcttacagttctggaggccagacatctgagatcaaggtattggcagggttgattctttctgagggctgccagaatctgttccatgctgctcttctagcttgtggtggtttgctggcaatctttgacattcctcagctgcatcacttcaatctctgtctttctcttcacctgacattatccccgggtgcatatctgtgtccaaattcaccctttttagaaggataccagtcatgttgaattaggggcccacactactccagtatgacctcatcctaacttaactaattacatctgcaaagaccctatttccaaataaagtcacattcaaaggtaatgggggctaggacttcaacatatggatttgggtggggtttgggaaggacacaattcaacccataacagtatctgtcaataacatatgctatttgtctcagctattcaactctgcccttgaagtgcaaaagcatccatggaaaaatacataaacaaatgggcatggctgtgttacaataaagctatacttatatattttttaatagatggcaagcctgtaggcagtagtttgtgaacacttgccttagagtatctctgattctttgtgagtatgaaaaagaaaaaaaaaacacatgaggagatttggcacttggcatagaagaagagaaaaaactttgcaagttttcaaaatgcctattttatatttggaattttagtcaaaatgctttacatttagctttaatatcttatctctacattcaaatatactctggatttatgtacacagtttcaattaagcaaactgatataaattttataatggtgactctagtaaacatgatacactttgtcttcagactgctactaagttctagaatgacagcaaaacaggcttttccatttaacattatacctgtatgctttgattttttgtatgaatatgtctgaaacatcaacaattgcttatgaacttggaatttctttagaaatgtatccatgtttatcctctgtgaatacatgtgtatattcctttccctttaattaatatttctagagtacctacaggcagtgtattaggctgtaaacaatgaatcctgcacaagacacattgtttccaaagacttataccctctggaagatatatacacaaagaaaacagacagcatatgacatatgttcaagcatcatccaaagatttacatacacaactgccatgtagaggacattgctttgttctgcttgggtccgtataaatgcatatatgtaaatctcacatctccatttataatgcatcttcacttggaaccttcatggaaccaaattagagagttctgtatagggtcatagatgtaagagcactttaaaaggctttcatggaaaacttgaagattgactatgccgtaaagaaaagactcaatcaggcacatactgtatgttttgcaatagtaacaaaggtcatgctaccattatattaaaacttagatccagcttattttatattaaaatgttaggcctctggaactcttcctccacatggttataaagatagctagagtcaggggccagcatctgcttgaaattttaaagtaacatatgtgcaagtagtgactggtgttactgaacccactcacaggtatcagtattggatatggggggctcattcagcttcagcaaaggtgccccataaaatcacttatctggagtgccccatttagaagctgaaagaaaatacccgctagattatacaaattataaaataggtcaaactaggagagcaaatgagtagatcatgtgcttttaattaggtttttaccttaaaggttttcagttcagacagagatattcagagcaagtaccaactatgctgacatacatgaaatgctgtatgaccagaaatgtcagatgtatatggctttaataattttaaccattttaggtccaaagaatacttctaaaatcataattcatagagtattctctttgggattataaaaacactatcacatttcctgactaaagacccatgacttccaacaacacaagccaacatctgcctttacacatacagttgattccaaaaccacatgtgggttgactttatattgctcaaattaagatttgaacattggtaatgaaactagaatttatcttacaaataaaacaataaagcatccctacattatttttaacctagaaactctgtgaatctcttggattctctggtctgtagtttagaagccatcgtcctgtcctaagaatcttccacacatttgtttggagatggggcaatttctctcatttctttctgcgtttacttaaataaaggaaaggggcttccatcttctcatagaactaaaaaagaaaatgaaactaaatggctttttttcttctcaacactttgtaaactttgactaggaaatgaagcactacagtgtgtcaatgaagaataatgataatattaataatgatggtgatgatgatgataatgatgaattaggcagtataattctcttcttattctaagtctgaaaactgaagcaaaatgatgaagtgcctttcccaagatcagcggctccacaatgagaacttgggtttgtcctccctcacacatcttcttcagaggagaacaaatatcactaatgttcatccgcaccaggagaaaaccatactggcccattcaatggccaattagaataaattgtatattaagaaaaatacgataggtagtacaaaaatcaaaagctctccaaagaaaaggaacaaaaaacctgaataaataagcttaacggtccattgtttgtggggaaaatgatgaaattatcatcaaaatatcctatgaattgagaatgaagatacatttttatgtagaaagatttttacaaaaaataaaaataaaaaattctacccagaaaagtaagactcttctaggacaggtattagtttttgttaaaggggtatcagtctctttctgataatagaaacaaatatactgtatatgaatcttagtaaactagtcaattatgattcttcatcctaacccatatttaagagaatgtttgtgactgtgctgaagatttgtacattaaaactgtctatacaggagagtgttctaattatcacagaattggcctcacagaatctgaatcattcaggtgaaaacattctttttatttaagagcaatttagagacacaggttaacaatagatactataacacagctttttgcctacaaaaaacaaacaaactcgtctaaatatcaatctgcagatgccaagcctgtgtttaaacaacgtgttaatttgcttcccctgacaaaactctgggtgaggtattgtttccacattcagggacgttagcccagtaatgcagaaaaaaaaaatcttcatttggacattgcatctttcagacattcccttcttttattgatttgttttctcctgtcccttttctccttcttttgtttccttatcatagcttcaggttattacgtgcaaagtattgatgggaatggatggttttggtcgatggagagctaatgcatccctaatcccactattgttgtagagttatgctttcctctggtctctgatgggggaaaaggtgcaaagctgttgatcctagttttatttgtcacaaacccatccatcaatcaagcgcaagcatgtctgaatgctgaatggcatgggggtctcagctgaaaaaattcgataactgtattgtcaggtctctcactctttttttgataagaaatacatttgactgaaatagataagcatgcaactactaaagacttgaagagagagaatgacatattggcaccaaaggttatatatctttggtattaatgatacttatgagtaaataaaacaggagggggcagctatagctagagacatacaacatccctaaggcttggtgatgtttaagtattgtcgctctactattatgtggatttttgaatattaatctgaccatatttcacagttgacaactctggttaaaatgcaagtcaatctgcagctggtgaaggtggtgtggttcagggaatcgaatatcacttgtttacatggatctggacattacagacagatcctttgttgttatgtacagtaggtaatcccatggcatatttttgtgtatgcatgaactcatacgttcacaactgtctcatcttgcaagtgaaagcatttgggggggaaataagctttaattattttaaactgggaatatatatgcatgtaatttcaatagtgaattaacttatagtatcaaaaatagtttctggtgtcccttttattctagttactaaattaggtattttaatataacataattaaaattaatattttaattatgaaagcttgtcttttcagttatataaatttttctactcataattatttcaagataatttcatttagaaatagtaaaaacattaaaaacaacactagtataatacaattttaggggcaaaattaatcaacaaatcagaacatttttaaaaactagtttattttcttgtcataacatgttagagaagacaagtattttttaaatgacctaaaaaaaagcccatcaagaaaaacaacaaaaagacagccttgaattagagggcatgaagatgaatgttttgtagccttaagtatcccatgttatgaaagtaagccatttttttctctgttcagtgactgggggctagacaactgaaaaaaaaaatcaatgtgggaatgctttagatttgttgggtaaattacatgtgcttggctgctccattgtatctgccctatattctacacaagataactgtagatggaactgtcacataatgcatatacttcacattgatttttatacttttaacagaatttcaattgaactccataataaagcaagaagagaaatgatatctccctcacattcctaatacttgaattatttttgaaattaattaagtaaaagctcccagttttgaaggcatggtgagaggcaaaaaaaaaaaaaaaaaaaaaaaaaaaaaatcaaatttggtttctaattctcctcaccgtctgtttttctgtttttgtttcagttatttacatttcatcttaacttccccacctctttaaaaatacgttaattcttaaagactttccaggagggcccatgaaccagcaaatgagagacagctgaaccttcgggagttgcgggagttgcaaacattgatctttctgttgacatccttttgggtttctagcttgctctagttttgcctcactttccagtgatttttagcattactgtgaagtctgatcctgtttaaagtctctgatgccaccataagggtttgagcaagagttcaaggagtccttggtgatcccaaggacaacctttctcagcctgaccttacctatagagaccccaaacaatcctagtggggaaagaagtaagtcagcccctactcagaaaaatactagaaaattgctccatcaactgtgcatacccaggtgttcggctctagacagaaatgtaatgcagcttctacataccctgagaacaaggttttactgaatttggggtggcagttccagattgggtgcccagggggaatgtggactttgtaatttcacccaggatgatgagaaactacagcaacatcaagaattcaagaaacttgagatttggcaacattgggactcccctcatccagaaatgccttgggaagaaggataaaatgtgagatgaaagagattcatgttcttatggcattctgaaactattattgaaatattttagaaaatgtaaaatattataaagaaaataaaattggctgagcacggtgactcacacctgtaatctcagcactttgggaggccgaggtgggtggatcacaaggtcaggagttcgaaaccagcctggccaatatggtgaaaccccgtctcaactaaaaatacaaaaaattagccaggcatggtggtgggcacctgtagtcccagttcctcaggaggctgaggcaggagaatcacttgaacctgagaggcggaggttgcagtgagttgagattgcaccactgcactccagcctgggtgacagagcgagactacatctcaaaaaatttaaaaaaaaaaaagaaaagaaaatcaggtcgggcacggtggcttatgcccataatcccagcactttgggaggccaaggtgggtggatcacctgaggtcaagagttcgagaccagcctggccaacatgataaaaccctgtctctactaaaaatacaaaattagccaggcatggtggtgcatggctgtaatcccagctacttgggaggctgaagcaagagactcgcttgaacccaggaggtggaggttgcagtgagctgagatcgcaccattgcactccggcctgggcaacaagagtgaaactccatctcaaaaaaaaaaagaaaagaaaataattcatagtgccatcacccacaagtggcatttgttgctcttttatagtatatgatatgtgatacaatgtaatattgagagacaaataattgatttcatgtttcataggaatattttaattatggccaattccacattaataattctattccaaatattctctgattaaagaaaaatcatttgataagactccatatgataaacagattaatttttccaagtaaatatatagatgtaaaacaaaaactctaatcccatatttaaactttatagactaattgtaatgtttatttggaagaataaatgtgtgatcaaagcccaaaaaagtgtttaaaaaaaagaaaaatgagaaaggactggtaccaggtgggaactatattgtaaagcttcagtaattaaacagtttgtgttctaggaatttgtgtccccagttctgataatgttcactcttaaattgtaatattctataccctaaagcactctccaaaccttaagatgaagaaaataggcaaagcaatagcagcaatgacaagagacctttttttttctactggtatacctcggattttcccccggcagagaaccaaggggaaatgacagcctccacaggatcacataaagaactgagaaattttttctttttttttttttttttgagacagggtctcattctgtcacccaggctaaagtgcagtggtacaatcacagctcactatagctgcaacctcctgggctcaaacaatcctcccacttcagcctcccaagtagctgggactacaggcatgtgccactatgcctgtctacttttttattttttgtagagacagggtcttactatgttgcccaagcaggtctcaaactcctgggctcaaacgatcttcctgcctcagcctcccgaagtactgtgattacaggtatgaatcactgtgtctggccaagaaaccttgatacccatcttttgtcccatcttacagaactcatagaattcatttcaaaacacatatagagaaattttgttatgttctccccagtttttgtctctattgcattggtcatagttctggtagctgtgccttaaaatagttaacaatgttcctccaaggaattaaaactaacacctttgtaattctttttttttttttttttgagatggagtttcgctcttgttgcccaggctggagtgtaatggcacaacctctgctcactgcaacctctgcctcctgggttcaagcaattctcctgcctcagcctcctgagtagctgggattacagacatgcgccactatgcccggctaattttgtgtttttagtagagatagggtttctccatgttggtcaggctggtctcgaactcccgacctcaggtgatccacccaccttggcctcccaaagtgctgggattacaggcgtgagccactgcacctggctataattcttttaaaactcaaacacctttgcagaaaagagaggaagacaactctacacaaaaagctcactcaagcattttaggaactggttatagaaaaataattgtcttatatgtttatatataaaggagtgggaattattacatagcttttaggcctgaccctggttcatgaattttccaaattctaccaaaacagcaaaacagacaaatcagtagaatagaatagagtctggaaaaagactctgggaatttggtattggtaaaagagagatcttaaataagcaaggttgctttaatatactaccagtatgaatgtaaaattggtaagccaatttagaagccaattttgcagtgcctactaaaagacatgcattgacccaacaatgcattgatccaataattccacttctctatatctcccagagaaacactggcacatgttcataataagacagtacagtgatgtagcagtagttgaaatcgtaaaaaattggaaactccaaatgactaccaacaggggactggctaaataaactatgccagaaccatactatgaatatgatgcataagtagaaaaagataagacagggctctctgcactggcccaaaaaaatttccaaaccatgtcactgagtgggaaaaaaaagcaaacttcagaatatcactacacaaggtatcatatgctgaggtaaatacacctcatatacacatgtataacaactacatcaataccattaaaaaaacataaactctcactaatctttgtctaccccaaatcatacatgaaaatatatttttatgaattaggaacttaatgacatttttaaaactataaaaattactaaaaataaatatacaaaaatatgtatttaaccttagcatgacacgaaggccagaaacactaaagaaaatttctggcagcattaactttatgacagaataacaacaataacaaacttctgtatatcaaataatgccacagcaaaaattttaaacaaaattgttggagggagtttaagtggctacagtatctcttcaaaaaaaatttctcagtatgtatatttaaaatgcacataccttgtaccctagcaatttgacttacaggggtttatgccaaaaaaaattgtacatgttgccagttgtgtgtgtaaaaggatgtttagcacagtattttgtgtttatagttgcatataaaagggggaggattaaatgcccaccaagaagaaaatggctaaatagattatggtacttccatatgctagaatacaatacagccattaagatagataatagtatatagtcaaccctttgcatccagttccacatctgtgagttcatccaactgcagatcaaaaatattaaggaaacacactgaaaataacaatactgcagttaaaaatataaatcttggctggacgccgaggttcatgcctataatcccagcactttgggaggctgaggcggatggatcacttgaagtcaggagtttgagaccagcctggccaacatggtgaaaccccgtctctactaaaaatataaaaactagccaggcatggtggtggacacctgtaatcccagctactcgggaggctgaggcaggggaatcacttgaacctgggaggcagaggctgcagtgagctgagattgtgccactgcactccaatgcattgatccaataattccacttctctatatctcacagcgagatatagagaattacaaaggtgttagagtttgaattctttggaggaacattgttaactattttaaggcacagctaccagaactatgactaatgcaatagagacaaaaactggggagaacacagcgagactccatctcaaaaaacaaaaacaaaaacaaaaacaaacaaacaaacaaacaatatatatatatcaaaatatagtataacaatgacattgtgttaggtagtataagtaatctaaagatgatttaatatatatgggaggatgtgcataagttatatgcaaatacttccccattttatagaactgcttaacatcctgaagaatggaggctttcctggacccaatctccagcagattccaagagacaactgtattaacttttattaagttccatgagcaaaggtccatttctgagttaaatacattatctcattcaatcctttcagtaatgctttgaggtaggcatcatcagaattctcattttaaagatgatagggctgagactcagagaggataagtgcctccaaaacatacaactgtctcaatccaaaacagaaattcttggaagatttgtatgtactaacatagaaagatgttattgaaacactgatatgaagaaaaaagaaattataaaagaagaaaaaggaagttatagtatgtatactgtaatgacatttatgtaaaacaatgtaaaagtgcaatgggaagaaataaacatgttaatgtggttgtctgtagatggatgagggagtgatggggattccctatcttctttttacttaactatattttctaaatttttttcagcgaggtacacacgttgcacttttaaaaataaagtagataattctaggataaaaccagtaatgttgaaatgtagagcaatgaatattattattattgtagcaaagataggtatttaagattcagtgttttgagacttctaatgattttgcctggagaacacattcctatctgtagaggttagaacatgaaaaggcagctggccttttttaatgataaaaaattagtatatcaattaagatataaaaattatttctttctatgttctaattacctagaagttcaggtactattttaagtactttggtgtttctgtttatttatttgtttggagatagggtctcactctgtcacccaggctggattgcagtggcagtaatatggcagcctcaacctccctggctcaggtgaacctcctacctccacctcccgaatagctgggactacaggcatgcaccaccatgcccaggtgcttttttacctggagtttcaccatgttgcccaggctggcctcaaactcctggactccagtgatctgcccaccttggcctcacaaagtgctgggattacaggtgtgagccaccacacccagcctgtttttaagtactgtaaaataacaatttatgagcagactaacatgaattgtgggtttcttaacaaaaaggatgaacgaagcaagttaccctaaacctattgtctctatttttcaaatgccatcctttgagatcagacacactttgtttccaggcaatatgctgagtgggaaatgcctagtccagtgggctgagcctgtcagatcaatacaatggaatctgaacttgtcacttgcaggggtgtgctacctgaggcaaaataactgtcaagcaccaacctctaactcaactataatcatatcaaacactcttgccttttctttgctctttcttattcttttctttctttcctttttttttttaatcttagtgaaatcaggttaaaatgggtatcaagaaaacttggaggctgtagcaagaaaaggtagtcctatactttctatggcagaaatattaaatgggaccgaaagtattgaataccttttttcgctcttgttgcccaggctggagtacaacagcgcgatctctgctcaccgcaacttccacctcctgtgttcaagcaattctcctgcctcagcctcagtagctggaattacaggcatgcgccaccatgccaggctaattttgtattttgtagtagagatggggtttctgcatgttggtcaggctggtctcaaactcctgacctcaggtgatccgcccacctaagcctcccaaattgctgggattacaggcatgagccatggcgcccagctgaataccttcttattcctatagttagaataaaagctagcactgcaacctgggttgcctgattcctgctggcacagagttctttgacgggacaaaactaagtaacattcagtctgagggggcttgtgtccgtaataacacagatgttttgcctttgtggataatggcagtggaggtgagggtggggtgaagagatggggatatgcactaactgtagacacgtaagctttaacaacagcaatcggagtcactttcttttcccttaactgcattttcctgagaatgacaagccaatggttccagtgttacagactctgaaatgccatactctaaggaaagtttctattcatggaaagccaaggactgggaaagaaagagtccttgatgtttttttttttattttcatttgcactttgactaaaaagatagtgaattgaggataaacaggcacatacacatatgatttgaggaaaacagtcctcttgcctcagaaatatgtcctctagtgactttctggcatacttgatatgcccacagtgaagaatcatttgttggagatgaagaattatctacgtattcaacattgaaaaaatattaagaatgcatttaccaaacctgttcttcatgccccccacctcaaaaaaagtgatgactgaatagtagagtctctatcccaaagaaacttaaaatctagataggagtcagacaagaaataagacaatttaaataaagagtgatgtgggccagatgcagtggctcatatctataatcccagcattttgagaggccgaggcaggaggattgcttgagcccaggagttcgagaccagcctgggcaacacagtaagacccccaactctacgaaaaatttttaaaatgagctaggcatggtggcacacacctgtagtcccagatactcaggaggctgaggcaggaggattgcttgatcccaagaagtcgaggctgcagtgagctgcgatcacatcactccagcctcggtgacagagtaggacctcgtctcaaaagcgaaagaaagaaaggaaaggaaaggaagagggggaggggaataaagggaaaaagaagaaagagagaagaagggagggaaggatagagggaggaaaggaggaaggaaggaaggaagggaggggagagggaaggaggaaggaagggagggagggaagtgttagcacaaggtgaggatatttatcactcaggagaaaggaagatgagacataccaatcgatgagcatagatatggtggaacccagaactggaagaagtggcaagaggctagaaagtaaatagcagagagtaagggctaacacaaagggctctttttatcctgaggagaaggaggagagcctttgaagggtttaagctggtgaggaagggtggagtgagtagggatgagaagacatgtgatatatgaatatattatatttatgcttgtataataatggagagaaaaatgcatcaagccattaacagtcacaaacatacttgaagaatttgttttaaaaaaacaattggcagagggaagcattcagaaattcatctcaaaattacattcttgctccaaaactgtggaaaacccagagatacaaactcctgacagaatatgtatctatttgagaagtcaaaactcctgtacacacacaaaaaataaagtgtacctattaacctatggggtggggatttctatgtagcagtggcttaggaaagggcacgttccagaaaaaattaaagcagcctccaaaggcctcatggaggagaggaaagaagacttcctgaggagagatagtgaggacaagggttttcttgggagggtggggcggggtagatggaatttgtgttcaaaaccaaaggcttgtgacatttgttgtttgtttgtttttgtttgtttgaggcagggtctcacttgttgcccaggctggagtacagtggtgcaatcacagctcattgcagccttaacctcccaggctcaaatgatcctcccacctcagcctccagagtagctgggactatagatacaaacgccaccacacctggctttttttttttttttttttttttttttgtagagacagggtctcactatgttgcccaggctggtctcaaactcctgggctcaagcaatcctcctgtctcaggcttccaaagtgctggaatttcaggcatgagccaccactgccagccttgacattcattcttgaaaccttaactgagccctgaaccagatggttttgatgtatgcagtaaaaataggtggaaacgacttgtctccaaagaccttcagtttagttatctggtaggaaaagagaagatactggtttgaatggaatagaagctttgttgaagggcagttcagagtaagggaatctcctcagggtagggggtgggggctgggactgggaggaaagggacctgcatgaccaggggtgcaacttgagggttctgagagagtagagaccaatcagaactctgaagcaaacttgatcacttcacagtatttgtcctactgatctggccaaagatacacacatacatgtgcatacgcacatgtacacacacacacacatttaatgcctacagactgcagtgtaccctagaagtatacatagattgtccttagatggaaaaacagcctatagaatgcttcgttacaatgtgtttgtattttagctagagttgccttccaaagaccttattgctaagaaacaatcaaagtgagagccctcctttgttaggaacaaagaagtttgaaaaaagattcctttggttcatgtgtcatttagttgaaggatgtttgttatggaaaatgcagttatgaaagtcataacaggcatcctaaaccttgacttaaagggtttgctttctacataagaaatcgttatctatttgttatattacatttgtttaaataattatctatttgttatattgaatttgtaatgtatagaaaaatataaatgaaaaattattcatagttgaccacagctaacatttaaatgtaatttctttcaattctatgtattttagccagttatgtcattgaagctgagctttttatttagtaatagatactttcagtttcccctctgatcacaaaggccagaggactctgttcaccgacgcaggtttctggcctgctaacctaaagtcctgtgttaatgttccgggtaacacagattttaggttttgagctgaaaggcacctaagggattaaggtaattgccctagaacagtggctctcaaagtgtaggcctcagacatgcagctgtgactttacctgtgaggtggttggaaatgcaaaaccaagggatcttcccaacttgctgcatatgaagctctggggatggtgcccagaaaagagtggggtcttggatgggggtggggtgttttgttttgttttgttttttgagacagagtttacctcttgttgcccaggctggagtgcaatggcgtgatcttggctcactgcaacctccgccttccaggttcaagcgattctcatgcctcagcctcccgagcagctgagattataggcacctgccaccacgcccggctaatttttgtatttttagtagagatggggtttcaccatgttgcccaggctggtctcgaactcctgacctcaggtaatccacccacctcagcctcccaaagtgctgggattacaggcatgagccactgcacctggccagaaaagagtgttttaacaagctctccaggtaattcttgtgcatgttcaagtttgaggacaaatcccagagaacacacaacaagctagtaatcatcacaaatccacagcaaaccctaggaataacgtgttccatggtgcctcctctcactcacacagtacttgcaaagagtaggtacttaaagcttgttggccgggtgtggtggctcacacctgtaatcccagcactttgggaggctgaggagagcaaatcccttgagtccaggaggtcgagaccagcctgggcaacatggtgaaacctctctctacaaaaatataaaaagttagcagggcgtggtggcccatacctgtagttgcagctactctggagaatgagatggaggattgcttgaactctggagctctggaggctgcagtgagccatgatcatgccactgcactccagcctgggcgacagagactctgtctcaaaaaaatatatatataaaataaaataaaataaagcatgttgactaaaagaatgctctcctaaatttccccaaatctgtaaaccatttcccatgcccttctgaacagatgccacctaaatttgcccttgaagcaaactttccttttattttccccagactttcctttgacctcctctaaagaaaaaaataagtaccacagaattttcttcttatctttcctggttgcaggcccttgctactcaaagtgtaggcagcagaccagcagcagggcatcgcctggcagcttgttagaaatgtagaatctcagacttactgaatcagagcctgaattttagcaagacccctaggtgatgcattcacacagcaacatttgagaagcaaagttctagaaagccagctgctgctcatgttcctgctcaagtgagtttcataataagtaaatttcatttttttttttatttgacggagtttcgctcttgttgcccaggctggagtgcaatgacacgatcttagctcaccacaacccccacctcccgggttcaagtgagtctcctgtctcagcctcctgagtagctggaattacaggcatgcaccaccatgcctggctaattttgtatttttagtagagacagggtttctccatgttggtcaggctggtctcaaactcccaacctcaggtgatacacctgccttggcctcccaaagtgctgggattacaagcgtgagccaccgcgtctggcctcataacaagtaatttttaatattacactatgtggcactaatttattcaacaagtatttcccaagtacctactatgtgcaaggattggtggtatggaaacaacattgaacaagacatggtctcagactccttgaggaatgtatagtttacagaagagatagactgtggccaccaatagccgggataccaagcagggtttggtaagaggcttctgagtggcctaaggtattgctattcagagaggacagagaatacttcctacaggagtgatgacaatgattgcttctacatgtagaagaggattttaaaagtcatgaaattagcaaattatattatagtataaacatacgaagttcagagtatcagaaatgactttagaaggtccctcatctaaagacatagcagaatatagtgaaaagagcttcagctttgaaaacagaaagacctgagttcaagtccaactggttaatcttgggaatgttacttagactctctgaaactaacttcctcatctataaaaaacacaatacctaagtttcagagttgttcacaggattagtgagagtgtgtgtatagtgtctggcacacagtaggcactcaacaagtggtatgactgttctgttcttgttcctgaggttctgtgtgacctataccctgtctccctttatctcaggcatgtggcaggagctgcttgaaagtgtccacacttgggagtggctggatctggcctagaaaggttctagccactagttcctagtcattgctctgaattgtagcactttcttcatacttcagtcttgagtggacatgaaacctgaaaattatgtgtttctatgaaaatcacttattgatctgcacaagaccgagaggatattactaagttgatttatgtttatgcaataatgtagatcaaattattttgaaatgttttgagtctagactgaataagtgagttttcctttgaataattggtattgtgtagataaggcctttattcctctcattcaatctagaccaatttgaacctcagttcgtcttgtgtctggtaacgtcaggagccatcaggatccagaataaagaatgaatcttatctctcctctcctctcctctcctccgcccttcttcctccttcaactcctttttttccttctcctttttctttccctccctctcaaggctattgaattttttatttgcttctcttaggaactgagccttgattcagctctgtactgccaagtaaatgactagatcagcttgaaatcttatgtaaatgataagatgtcaaaatagtagtccaaaatagtagttgtctaatgcctctcatagtctttaagaggtcattataatctgtaagagaaagctgaaaatattttttcaatgttaatgactcagaaaacagtagatattgtaccctcctatttctctgaaggaaaaaaagaaagcgtctcatagcccaatagattctataaaacagaaggcaagaaaaaatatcttagaaattactcttgaatactaagggcttaaagctcaaagtgcctgattatccaatggacagacccatacaagatggagccccacaaaatcagtattgccataaagctagagtgatcatatactttatcacttctaactcatttaacaattaaagggtgctattaataactattaattatagtcatacatacttataataattattaatgtagaatagtcctgggaaacagggatgtatagctatccttcctaaaggcatgcaagaataggaatatgatttggagcagaggtgatggtaaagagataagaaaaatattatttttcttcatttaaaagacaatgtttgatgtgataagtgtatttgtaaaatctgtccactaggctatatagcttgatagctatgaatgctcaaaaacatacctcaccttatttattaagcaagttcagctctatgaaacataacctagaattaaatctctgagtggcaaagcacacccattaacatttacgtgcctcaaagaacacgaaaagaagccccttagcccttccctcaaagcttactgaatcctccttgaaacacagcttgttaacacatttggttaacgaattccaacccacagtcctagaaataagaagtcatatataagaaaatataatgagcctggcacacgcaaaagcagcagagggacacttgatagcctcattacgagaagccagacagaagaactccaaagcacattctctgtggcctgtaaacctatagtccctgaaaatcccactgttctacaacacagcacactaactgatttccatcattacaatcttgagtcatcaataagaaagttataatttaaatgagaagtcatggagttagaaagactggattgtagttctaacactgccattcactagctttgaccttgagtaaattattcaacccctcgtttagagggatttaacccttattagcattagcatcatctgcaaaatgggaagaatacttacctaaggatgatgataatgatgaaatgtgttcatgcttttaaaggcctagcactgtgtttggtgtatgggagctgctcaatcaatggaagttgtcattcatcataataggaagtcctgtgtgttctacataacaagaatgttaccctgcatggcaagaaacattacaagattatcactattagggtttttaccaatgaggtgctaaccgggtcagtttatgacagcagatgttatggcttgtttggaatggtaggcatgaaaatcaaatagccatgcatgattacataagcaagaagaagaatttgagcagtagattatcacagaccaacagaacagaaagtgtcatgttctattggggtcaggatagaaagtgatatcccaggggctcaatttagggaggaatagagtactcccagatacccaggtcctcttccaaagttggggcctaggatcctgtggcagaccatttgaccaacatgaataaaatttggaaaaaaataaaaaggtttttttttcccccataaaagattagccttcagaagttcccaaagtaaaaattgtttataagtggattgcattgccttgagaaattagtgagtttttcatcaacagaaaggtgtgttcaaacataactttaaaatctcttgaaatgaccattattaaatggatttaagcattgtttggaaagctaaattaaattactttatcatcgtcctttccaaaactaaaacaatatttcacttatgtggaataatttatagattcattaaaaatgctaagtaaatgaagtgctattgtaaatcatttattgttctgaatataaatgaatatgttaattgaagaaattcataaggtatcaaatacatatataagagaaaataaacaatcatgagcctgctcatctgtcataaacattttctttccatcatttttccacaagtttttccaaagtttagactgtattatacaggcaatttttatcttacagttttttgctttgttataatcatttttgtgtcatcaaaaaatgttttgggggggccagccacagtgactcacacatatattcccagcactttgggaggccaacatgggaggactgtttgagcccaggtgttcaagatgagcctgggcaacacagggagaccctgtctctacaaaatttttttttgattatccacgtctctgtgatgtgattattatgcactgcatgcctgtatcaaaagtctcatctaccccatatacacacctactatgtacccacaaaaattaaaaattaaaattaaataaacattttttaaaaggaagaaaattagccaggcatggtggcgtgtgcctctagtctcagctacctgggaggctgaggtaggaagattgcttgagcccaggaggtcaaggttacagtgagctgtgttccagccacagtactctagcatgggtgacaaagcgagaccttgtctcaaaaaaaaaaaaaaagttttttgggcattattttaagggttacaaatattatgttatctcaacacatcaaatttgggctccaaatctacatgcctcagtggaaatcctgctctgcacttaccagctacgtgatttgcgcaatttactaacacctctgtgcctatttcatcatctgtacaatgtgaataatagcactacctatctcatagctttattatggagatgtaatgagttaatacatgtaaaatacttagtatctgacacatagtaaatattcaataaatctttattattgttctattcatttccctaacatgaggcacttagattacttttcatttttaaccattacaaataattctgataaatatctttgtaataaatgggttatgaaagatattcttcacaatccaaactcttcagccatttttttttgtttcagctgtttgtttttaagcatgaaataatggatgaacagatactatttgtttgaaaccagtagctttgtcaatatgtttttaaagaaagaataataatctatttttattgttttctgtcttccttttttacaaaatcatggtacaatacacataaattttaccataagtgacatttagtatgttcccaatgttgtacaatttgccaatatgttttcaggccactgatctcaaagatggtcaaataaaatgcataggaaggaagcaagaagaagcaaaccttattagcctcaaaatgtcttttatgaacaaggaaacaatatttccttgttttcaaatttcattaagaaactattgggtccaaccaccaagttatagccactttaaatattttctggaagatacatgcatccgtaaaactttacttccataatctgttcggtcagaaagatgacagaagaaaaagggttaacacttaaggagtctttaaggagttcggatattgtggaaggtggttaacataaatgaccctatttagtccttataaagatgatgagctatagcaattgtccttcagattacagatgaggaaactgaagtttggagaatgtgacataatttatctagatgcacacagctaagaagtaacagagacaggactcaactcagacctacctgattcctcaggtccatactctttccatataccactgccttgttgaaataagcatgtagagcccagagtggtggctcatgcttgtaattccagcactttggtaggctgggacaggaggatcacttgagcccaggagtttgagaccagcctaggcaacaaaatgagaccccatctctacaaaaaataaaaaaattagccaggtgtggtggcatgtgcctgtagtcgcagctacttgggaaactgaggtgggaggatcacctgaacctgggagatcgagtctgcagtgagctgtgatcatgccagtgcactccagcctgggtgaccctgtcaaagaaaagaaaagacaaagacaagacaagatgagacgagacgggacgggacgggatgggacgggatgaagggaggaagggaggaagggagggagatgaaataagcatgtaatattatcctaaaagaaagagattctctgaaagttacaacagaaacttcaataaccatctagatagaaaatctcaagtccgctaactaggcaatccaggttttgcagctttccttagtagttgagatagtccttctaatattgcatcctctatttctgtccctttattgcctagatgtgtcaacatccctgaaggggttatcctgaatgtgttaggcactagcgctcagttccatgtcaaaacacacaaaggcttgttgacccaacaagaaattggttgtagtgctgctttacataaaccaaaatcacagatctcaaaaactttcactcttcttctatcagttattttttttcacatttgacaacaaacacacacagataatcaagaaaagagggaaaaaatgtttttcactggaagaatcaccagaatttactgatagaaattagcagtgggaaatggagtcttgtgttcatagtctcatcttgtctaaagccttgttttttatttgctcatgtccttgagttttctataaggctcaatttttcatttgcaacacatgaataattaaaacttgtagctttgggacatgtaaaatcatattcatcaaatgctttcatataaaaattgtttttagacagacatgcaaacatatatggaacacctagtactgcactaagcataataaaaacaaaatgctaatactaagtagaaaccagtatgaacgtggctccctcatccaaccagccctgaatggattagtctgttgtggttgctgaattcaacttctctgacactaatacagctggattgcaggaatgtcctgtaattcacttgtattagaagccattaaaattttgaatatgttgcctattaagtaggttgtatattcctacccctctacttctctgttacttttttataaagaggccatttctgcttcagttgttcttactttactttctttgcacctctccctcccatttcacccataccactaccatctgaggcagtgtgtggtattcctgaaacattactgaccttcttcaaagtaaaagaaaaagagctagcaaatactgtaaaccttagaagagggggaaaaaaaaacttccttcctaaatggctacaattgacaaccctgccatttagtctaaagagcagtgaccaattttaagtcaatcttcaacttttaagtggggccagaattccccagtcctgtatctagctcagtgctttggtgggataagagcatatgcccgtagagcacaatactcttttttcagagtgacattcatctactcagacaaatttaactccatcagcagaatcaagttcacgaaacagtggctgtgcaaattcacaatgaaatctttattaaaatctagaatcttccagagcattttacaggaaaactgtaaaaagttaacttccttttttcctttctctctctttcccctagcccccacaatgatatcagtaccttatgtaacttggatgttccacagcttataacagaaaaaatatgtcagtttagtctttaaacagataaggaggaagtgtacgcaagaaaaaggaaagttttggagaggcattttataatttctcaagtaataaatactagtaactattgtaaccaaaaaacaatgcattgactatggttatcacataaaaatcctctaaggattgcttttaaggacattatgacaagctggtgatttccagatatttgtgctagtaggacactcaatactccataaatcattccaccaagatggttgcttattatggtctgtaagattgcattttccagggcatgactatagaatatctaaaaatcagcttatagaatactttgagtcaaacaaattgctcagaaaaaaagtaattaaatctatcctttaggcaatttggagggtatttatcaaaattataaatgcatatacctttattacagcaattctacatctaggaatttattctaatgaagtacacatgtacagaatgacttatatacaaaattactcatacatacaaaatatgacattattgcttgtaataataactattgaaaatgattttaatttccattattaagaaatagtttaagtacattatgatagaaccatgcagttgaatctgaagccataaaaaagaatgaagatgttccatatgtattaattcatttagaaagctgtgtaagatacagtgttaaatttaaaaagcacaaattatctctggaaaactacacaagaaggtactaacatagtctgtaagtaggggaactaagtgtctagggctggagtcaaaaatgagagagaaaactttttatatgttttgaattttgagtgataggaaagagtctggtcagttagatcaaaacaaatgatgtagaaaatgccttaaaaagtaaaacatggccgggcatggtggctcatgcctgtaatcccagcactttggaaggctgaggtgggtggatcacgaggtcaggagatcgagaccatcctggtcaacatggcaaaaccctgtcactactaaaaatacaaaaattagctgggtgtggtggcatatgcctgtaatcccagctactcaggaggctgaggcaggagaatcgcttgaatccaggaggcagaggttgcagtgagccgagatagtgccactgcactccagcctggcgacagaacgagactccatctcaaaaaaagagtaaaacattacaatccacgtatccttcaaactggcttgtaacagaaaaactgctataaatagttgtcttgtaaatgctttcagacaccaagataaccaatttagcaaaaaggaaaaaaatcaaatcaacaataaaaaaggctttaattatataatatacaatatacatacatacacacagtgaatggcaatttaatttttcggttttcacatgttacaatcatatcatgtaggcaccattatttatctgatcaattaagagaccaatggttattctttattatcttaaatattttttgagcacctatgatatgtaagtaccaggttgattctggaaattcctgtgtcgaataagacagacatggtctctgatctcctggacagttctggtacttcagctactaaagacagaaaaatttccttttttagaatgatacatgcaaccctcaatagctgctttcccagctaagtaaaatagtaaacattcaaatgtgaaatgaaaacagctggagcagctgggtacaatttaactttacatgaaaaagtcctcagacatagattacttattctctccatatacttgagcaacttctgttctgggtcaggaggctcagtgtataagaatagagtcaggaaaagctctcctctttcctcacatctccatcttcctctatatgaacaccttcctcagcccagaaagaaggaaacacacgaggagtgcttttaacaagattccataatttgcagttgatataagctgtttgcatgatgtgtgctctatttttagggagtttagaaacatgttgcttaacacttgtgagaaaatgattgcacagtctctattagaatctcattagcatacgtgctccatttttttgagtgtagacttacaattgtaaatctcccaaactagcaaagcatactttggtgaaaggtgggacaggggatggtgttttcaaaaagcaggggaagcgaagacagaacagggagaatgtagtaagagtaactccatccttgagtgcctccttcgcacgtgagacattatacttcagaaataagatgctttcccatatgagacaaccagagtcaagggtagagaatagtctgcaaatgagtgaatgaacaggagaaatcaattgttaactgatgtatattccatgcaagtctgagcaagtcacaggaaggaaacagagaggcccactacctgaggaatacctggactgcaaaagtggaagaacagcataatcacaaatagaatatcaggaagatttggaatagctagattggtctcatcactgacaatctgataaagtgaactcctgtctttgcttccttgctctttttttttaacactattggacatacaggtatgcacaagtttcaggaagcaatatgccttcagaagaacaagatatactttgcaaacctgagttcatcactgaatcaaatagatcatttttatatgtttttcagggaactttaattatacatagaaaaggaaacagccttgatttctattgcatttcttttggctaccagagtagcacatataattttgaagtaaccatatgtcactaactttacatacaaagaattccaatttgcctcatagtttgcaagaccacacactttcaaatgtctaccatacacaatagaaaaaattggtgagtgctttacctcttacattgagacaagggtggggggaggaacttaaatatgttaacataaaatgaactagtgagagcaaatttactgttgaaaattataaaatcctacagaaatactcctgtgttgtctgcttatcacatataaattgtacaccaaaatttttatttattggaaacatataaacttttgtacacttaaggattaaatcaccaagatgccaacgtatttatcttatggcaattgctcatgaaatgacatctcttttagtagatgaggtagttaaattctttgaagacaaatgaaacctagatcttgttttagtcataattcaaaggctaatcttacaaaatggctaatctttaggaatctcattcacacttattcattaccaaatttttacagtctggccaaagaactgctaagaaataataacaagcagtttagttttgatatttatgaacaatctaaaaataggccaggtgcaatatagcctagtgtgtcaataagatctttgaaatttattctttgtagataggaaagaggatatagattatcttttgaatacttgttaatattaaagagttgacagtcattttaggcttataaatatgtaactataagtgcaattgtttgcatgaagaattcactaaagttttagaatttctaagggattgagtactatcttgaatctcaaattctatagtcttctagttaacgatgaaaattatagtagtagcagctaaggaccaacacaaaatattttcaaatgaataattttgagtgtcatcatctatattatattggtagagcaaatgatagcaaacagattatgttgcctgggtttaaagaggctttccaaaaacttttaatctattagctattcctaaaattatttgttttctgcacagttcactgctgctctcccatcagctaccttcttttttttctttcatgttctttattcatcaaatacttatggagcacctgctgggcactaggaccagagtagcaaacaagacacagcttttgtagcccaggtatagttacctttgggccttcattcatcactaggtgcctgtaccatttctaatttatgaaggatgcaaaaatgataatcttttaatcctagatttatttgactgaacataaaatcccgtttcttaacgtcaagcccagaaaatcatttcagagtcatggcaagtgtgacctctcagcctatgagcttcttcattagcccatccatcctaggtcatggccatttttcacaccttttttacactcttctgactttatcccatcttatatgtttactgctttgagtgaatttattaattagttaattttatatacataatagactatatttaaagcacatgcctcactgtcctgatgaaaagcaaaatattaggtaaattaaatgctttttctttttactaatttctgaattctcacttttttttgtttttgtttttgtttttgtttttgttttgagatggtgttttgctcttgtcgcccaggctggagcgcaatggtgcgatcttagctcactgcaacctctgcctcccgggttcaagcaattttcctgcctcagcctcccgagtagctgggattacaggcgtctgccactatgcccagctaatttttgtatttttagtagagacagggtttcaccatcttggccaggctggtctcgaacccctaacctcaggtaatccacccgcctcagcctcccagagtgctgggattacaggcgtgagccaccgtgcccagcctgaattctcactttttatgtagctgtcttaatattgtatatgtgataacctcatgtctggatttcaaaatcgataaaacttccaaaaaactagagagatctatagaaagctgccaccaaaaagatgtttaaaacaaactattatctagcccctctgtcatataacaaaagaacaaatacttaaaagtgtaaaataacatagtctcagtgtaaaggatagtcttaatttaaactggagcgattttactcaattgagcaaacttactatgttgtcctaatattcctatttcatgtagatgggcaaaaatcatgaattactacttaagaatgtgagcaaaggttatctgaaaaggaatttggagaaaagagactccttcttcttctttttttttttttttttttttttttttgttgaggtggagtctcgctctgtcttccaggctggagtgtggtggcgcgatctcgtctcactgcaacctcctccttcccagttcaagccattgtcctacctcagcctcccaggaaagatactttatcccagtgaacagtttgcaaaccaaggagatgcagttttcagtttcaaacaaagatgcattccagagagcaaaggagggggggtggtggtttacagagaaagttcccacccaggttcacaatcaggtccgttcatacaaataaacaattcaaacctgcttaggttctgattggtcaacacagctgtttgatgggttgatgtagctgaattctgattggtcaatgcaggtgagctctaattggttggctctggtgagctctgaaagtcccaaagttgaacagaggtttgtgttttggagaaacgcagaataccatgtgtgacttctaggcagcaaatggctgcttggttctattttaaatttaggcccagttagccactttgaatccatcttgaacaattggctctttcaggtttacatttgttcacaggaaccactagtatacataggtaataacaagtctagacatctcagctattttaagaatttcatttaaaagatatttgcgaaaagttcactgcctttattttaaattttgcagaaaataaatgagtattacgctttgccaactaaagtaagttgaaactttttaaaaaaaatcttattgctggcgtttcaataaagcaattttagaaattagggaatctatccttttttaaaataacttctaagagcttccattacttctcaggataaattattttggggatttttcagctgtgttggagaacgttgaagatctgatgcagctgtatctaagacctcaagttgggtctgtaggggagtaaaatgtctgttacctattcagtagttggatttgtattcactttcaaaaaattaatttcagatgcagaaatcacaagctttccataaatgttttcaggcagacagacaatataacgtttctgttaataatgaaaaaaacctttgacaggctactccatagctgtgttcctgctcctcccatgtatgaatgggaggcagttactgcaaaggaattctcattccaaccatatgtgaaaatagagcagagacgcctctaagtttgaaattatgccattctcagaaaagtctgtgtgacacaataaagataaaaatggattatgtacccatttaaattacttctgatttttcttctagatataaaagtttacctcctactttcccaaacattaaatttaatttgaaataaaagtgaagtaatttgatctcatcatatggggtaaatttaggagaatattgaccttgattttgttctcaaagtttacagtctgtatttttatttataaaaataaagaataatttaataatgaaagtgctatatcaaaaataaattcttacaattatgtcatttatagataatgcatttttatcaagaccacttttttaaaaagtggtggattattttgtgtcaacatatgtatatgcccatgaacacatatgcaaaatcacaaaatgcttcatcaaacaagctaaattgcatctttgctctgttttccaattatatgtcagaaatttgacaccatgtaatgtgttctgaagctctattgctgatagtaaaaataaaaaggaaaaattacatgcacacatgtttattgcggtactattcacaatagcaaagtcttggaaccaacccaaatgtccatcaatgatagagtggattaagaaaatgtggcacatatacaccatggaatactacgcagccataaaaaaggattcatccatgtcctttgcagggacatggatgaagctggaaaccatcatcctcagcaaattatcacaaggacagacaaccaaacaccgcatgttctcactcataggtcagagctgaacaatgacaacacatggacacagggcagggaacatcacaccggggcctgtcggggggtgggagactgggggagggatagcattagcagaaatacctaatgtaaatgacaagttgatgggtgcagcaaatcaatatggcatacctgtgtaacaaacatacctatgtaacaaacctgcacgttgtgcccatgtaccctagaacttaaagtataataaaaaacaaaaaaggaaaaactaatggtaattacagtgtatcataaaaggagtttataataacttgtattatgcattacagttcatgagagtttaactgagaaaacaatgaaacatctttttctgttattagtcatgtacattaaatatatatttatattacattacattaagcacatattttgatttaccagactgtaagttctcatgggacatttcatatctgaggaaagaattcactagtatgggagaagtaggcttactcaggaaacaacagattaattataaaacttcaaactcagatctcataatgtacacaaaagttttcagtaaaatttcaatatttaatctgtttattatttgtaaaagataatgggcataattctgaactactaggatgtcatacagacgtccattcacatggagtagttcttccgttaaaacatatttttatctcggtctgggtagtggaagatgagtagaagctcatgtttatgaaaacaaaaagaaggaagaaaggagggagggaagatgagaaagataatgtcccaaggagaaaggacagtgaactaaaagtgaattttatctcttgtgtgttccattatcttaaaatctaccttacaggctgggcgcggcggctcacacctataatcccaccactttgggaggccgaggcaggtgaatcacctgaggtcaggggtttgggaccagcctgcccaacatggtgaaaccccatctctactaaaaatacaaaaattagcccagcgtggtggcaggcacctgtaatcccagctacttggaggctgaggcaggagaattgcttgaacccaggaggcggaggttgcagtgagccaagactgcgccattgcactccagtctgggcgacgagagcaaaactccaactcagaaaaaaaaaaaaaaaaaaactaccttacagctatgcaatgtcattgttcatttatttcatttatttttatcaatatattaagtgaccacttaagatataattaggcacataatttcagttattcaattcagataaaaagatttttaaaatcttatttcctatctatctagtaactataaaaaggaaatttagtatttgccagggaggacagagtttttttgttctttaaaaaagttaatggataatatatttaaatttttcaataaaatatatgggtaaaaattctccctcttattcctgcccccaataggccccattatcactttttccttcaacacgtaatcgctgttattagtcccttactgatagacagctaattgtttctaaacttttgcaaatacaaccaacacacacaaaaaatacttcatttaaatgtcagttcatgtctatgcatctgcaagttcatctctaggaaaattttctagaagaattgcagggcaaagagcaatttgcaaattcaatagatatttctaaattctaaatagtacttctaatttctaaatagtatatcccctttcacagggaatatactaattgatactgctacaagcagtgtacaacaatattctttttcctacaatcttggcaatatatcacctaatttaaagattttgtcagtggataagtgggaaatggcattttattgtatctgtaatttgcatttatgaagagtagggtcaagcatcttttcatacattaaggagccattcaaagttccttttctgtgaagtatctgtttatatgtttttccattattctcttataatcttggaattctttacatattaaggaggttagtattttgttttacacaagttacaaatatttgtctcttgatgttatagaatttttttgtcgtgcataagtactttcgtaaaaaaaaatgcaatatattttttcttctgtagtttctgaacttcttattagaaatactttccccactgtaacactccaacatcatttatgtatttaagtatgtatatacttaaatttgaatatagagatttctaaagctgtgatacagagtagagaatataatccaaagcacaaatctaccctccttctgtctcttcactttcttttctttttctttttctttttctttttttttttttttgagatggagtctcaccctgtcacccaggctggagtgcagtggtgtgatctcagcttactgcaacctccgcctcctgggttcaagcgattctcctgcgttcaagcgattctcctgcctcagcctccccagtagctgggaatacaggtgcccgccaccacgcctgactaatttttgtatttttagtagagacagggtttcaccgtgttggccaggctggcctcaaactcctgacctcaggtgatccgcccgtctctgccccccaaagtgctaggattacaggcgcaagccaccgcgcccggtccctcttcactatttcttatttcttcccctctttctcaggtaatttcttgatccccttcctaagtattgttctgagttcctgggagaagttcagctatcctaattcacaaatcgttcttcaaatgtagaaaatgagaagagatggaagccaaggaagggtgtgtggaatcaagtagcagttctcaaaacagcatatatcaagacctcagcacatatcaagacctcagcacatatcaagacagtggcacaaaagcatcgtagtgttgtcattcaccactatgcaggagggaaagccaatttcatttcagaatgtcctcaattaatctgtagaaattattaattttattaaatcccaacccttgagaccaagtctttgtaatattctgttttataatatatgaagtatgcataaagcacttctgtgtattgaacaaagaaccacaagtaatctcatcacactttcagtagcaattgagttgcataccaaaccactggcaccttttcttgtgaaataccatttttatttgaaagaataattggcaaacaaactatggttattcagacttgcattttttttaatttaattaaaaacaaaatgaatgtgtaatcttgagaaaaaaatgacagcattattgacagtaataaattttaagctttcaaatagaaattaggattttggaaaacttatatccaccactgtgagtttcatatcttcccaatacttaagcacttttctgatgagatcggtgttattattaacaaacatgatttttaaatattgtatgcgatatgcattactcagcgaaccaatattttctaaatgacaaatgcataaaattataaaattataaatgggtaaaagattcatccaagtacaagacatgccaattaattttaatataataaacttcaaaaagttcactgacaatagtttcagattctatattgcaaataacctttaagaaactaccacttgtcaatctttggtgcagtatcaaagaaaaatatccacaggtatctgcaaaggctgttaaaatactcctcacttttccaactatatgtctgtgtgaagccggattttctagatatacttcaatcaaaacaacatttcacacgagattgaatgctgaagcaaatatgagaatccagctgtcttctattaagccagacattaaagagatttgtacatgtgtaaaatgatgacgctcttctcactcaatgtttatgttgtaaaagcattatttttcatttaaaaatgttaatattttatggctttatgattatttttaattattaaatattacagttttctgttttaatttctaatatggtaaataacaaaagcttttgagatcctcaataattttttttttttgagacaagctctcacgctgttacccaggctggagtgcagcagtgcaatcttggctcactgcagcctcaacctcatgtgctcaagtgatcctcccacctcagcctcctcaggagccaggaccacaggtgtgtgccaccacacccagctaatttttgaattttttttgtagagatagggttttgctctgttgtccaggctggtcttgaactcctgggctcaagaggtccacctgcctcagtctcccaaagtgctgggattacagacgtgagccacttggcctggctccaagatcctcaataattttaagagtataaaagggtcctgaaaaaaaatgtttgagagctgctgaaatagagtttatttctcagataactgaaacttcagaataatcatacaggccatgaaaacaccctctatatttgccaggcatataactataatttgacctttggctaaaataccttgattctctcttaggaaaaaataagagtacaggagacacccccaaaaatgcatagtacaagaaaaatgttttattttttttaattacaaaatgggtccaggcatgatggctcacgcctgtaatccatgcactttgggaggccgaggcgagcggatcacttggggtcaggagtttgagaccagcctggtcaacatagtgaatcccgtctctactaaaaaatacaaaaattagctgatcataatcccagctactcacgaggctgaggctgaggcagaagaatcacttgaacccaggaggcggaggttgcagggagcccatatcatgccactacactccagcctgggcgacaaagtgagactccatctcaaaaacaaaaagaaagaaagacagagaaagaaaggaaggaaggaaggaaggaaggaaggaaggaaggaaggaaggaaggaaggaaagaaaagaaagaaggaaagaaagagaaagaaagaaagaaagaaggaaagaaagaaagaaagaaagaaagagaaagaaaaagcctggcacggtggctcacacctgtaattccagcactttgggaggccaaggtgggtggatcacttgaggtcaagagttcaagaccagcctggccaacatggtgaaaccccgtctctactaaaaatacagaagttagctaggcatggtatggtggtgggtacctgtaatcccagctacttaggctgaggcaggagaatcactttaacccgagaggcagaggttgcagtgagctgagatcaggccactgcactccagcttgagtgacacagtgagactccgtctcaataaataaataaataggctgggcggggtggctcacacctgtaatcccagcactttgggaggccaaggcaggtgggccacctgaggttggaagttcaagaccagcctggccaacatggagaaatgccatctctactaaaaatacaaaattagccgggcgtggtggtgcatgcctgtaatcccagctactcgagaggctgaggcaggagaatcgcttgaacccgggaggcggaggttgtggtgagccgagattgtgccattgcactccagcccgggcaacaagagtgaaactctgtctcaaaataaataaataaataaaatacataaataaaaatgaaattacaaaatggtatgtgacagccattgtagcataatttgaaatagcaaaagattgaaattgtaaaacacctaaatccggtttggtttggtttgttgttgttagttttttgtttatttttgagacaaggtcttgctctgtcacccaggttggagtgcagtggtgtgatcatagttcactgcagcctctacctcctgggctcaagcaatcctcccacgtcagcctccagagtaactggcaccacaagtgcacaccaccatgcctggctaatttttttttttgagacgaagttttgctctttgttgcccaggctggagtgcagtggcatgatcttggctcactgcaacatctgcctcccaagttcaagtgattctcctgtctcagcctctcaagtagctggcattaccaggcacccaccaccatgcccggctaatttttgtatttttagtagagatgtggtttcaccatgttggctgggctggtctcgaactcctgacctcatgatccacccaccttggtttcctcaaagtgctgggattacaggtgtgagccaccgtgcacagctgctaatttttttttttactttttgttgagatggagtcttgctattttgcccaggctggtctcaaactcctggccttaagtgatcctcctgcctcagtcccccaaagcactgggattacagctgtgagtcaccacacccagccttgttgttagtttttgaacctcagattcccagaggcagcaggttgattaaattatggccttaatttcttagtatactgtcattggcccatgcaagatgcttctccttcactttattttgccctttcttcaattattttattttcctccatcaaagacttgcccattttaaagagattgatgtgtatcttttaatgtgtacagaattaaaaaatagttatggttgttttgtaaagaatgatgtgttttctatttaaataaatagcacttgtggccagacccagtggctcacccctgtaatcccaacactttgggaggccaaggtgggtgatcacttgagaccaacagttcaagaccagcctggccaacatggcagaaccccgtctttactaaaaataccaaaattagccgggcgtggtggcacatacctgtaagccctctccaatacttgctattatccacctttctaactgctgccattcaaatccatataaagtgatatctcattgttgttttaatctgtgttttgcctctttatcataaactttagcaactcacgatatatttgttatttatttgaacctcctctgtgaactgtttaccctgttaggaatttttatttttgtttcctatctttttcttgttaatttaagaagttctcacatgttttgcatattatccctgctagtttttaaatattggaaataataacatgtttgttaactttatctatgttactcacactgaacaaaattccttaattttggcgcagccaaattcaaccatactttttgacttatagttggtgcttttgagattttgtttaagaaacttttccccactccttagtcacaaaaactttatttcatattttcttctatcatctttatagatttatctgttacatttaggtctttcatccgtcaacagacaacctttgtgtgagttagaaatctgtatttttcttcacatgatgagacatgtatcctaacataatctattatgctaaacaatttgtccatttttaattcctttgtgatacaaatgtttagtgttaatttttttcttttgtagagatgagttcttactatgttgcttaagctggtctcgaagttctggcctaaagtgatcctcccacctcagcctctcaaagtactggaattacaggcatgagccactagatgtttatcatataacaagtcctcacattaacttgatcttcagatctatttctgagttctcaattctgttttctctgtttgtttgttttgtttttttcaattctgttttattgatctatttatatattgctgggttaacaacatttatcatcattatcatcatttatagtatgtgttaatatctgatgagtgaaagtaataccatctatttggcccatcattttttatgctattctttagacattttgggcttctagccatccatataaatttcagaatttgttgtgttctttaaaaattcaattaaattttgtattggaattttatttactttgtatgtatacttacacagaattggtaactatagtaggttacgacataccaaccgtaaacatagtatatttcatcacttattcaaatcttatttatatcttttgctgtctttctactaaaggaaacagtagaatgaggattttttttatttaattttaacgcacatttttatttaaaagaggtttagccgggcgcagtggctcatgcctgtaatcccagcactttgggaggctgaggtgggcggatcacaacgtcaggagttcaagaccagcctgaccaatatggtgaaaccccatctctactaaaaatacaaaaattagctgggcatggtggcgcacacctgtagtcccagttactcagggggctgaggcaggagaatctcttgaatccaagaggcggaggttgcagtgagccgagattgtgccactgcactccagcctgggtgacagaacgagactccgtctcaaaaaaaaataataaaataaaataaaataaaataaaataaaataaaagaggtttagtagatagcaaatctggtgacaccaatttcactctcagcaatggtttttcccccaaaaatgagtaacatactgcctaataggaattatataataaggaagacacttagtaagacacttaagaaagaaatggaaaaatatagctgtgattattaaatcacccagaaggagctaatgcaaaggaggaggagcatcagcaaaacttgttctgggattgcagtttacttttatctttgtcttttaaacacctatgctttgtataaggaagaaaagatgtctcttagtagaagccacagaaagaatgcaatgtcagcttgggtaaacttctgatagtaagcttgtcggaggcacttagtgtttgttgaatggataaagaaatataaaggaacaacaaataatccttcttgatttgtcctgaaatgtaattacaattcttattggggggtgagtaagaacatttaacatgagatctaccctcttaacaaaattttaattgtacaatacgttattattgactatagatagtgttttacagtagatctctcgagcttattcatcttgcttagctgaaacatgatgcccattgattagtaactccaatttacccctcctctagcccttggcaaccaccattccactttcaatgtatgaatctaactattttagattcctcttataaatggaataatatggtatttgcctttctgtgattggtttattttacttagaataatgtcctcaatgttgttacatattgtagagtttctttttttaaggctgaatagtattccatttaggtatataccacattttctttattcatcaatctggtgatggacatttcagctatttccacatcctggttcgtatgtatagtgcagcaatgaacatagagatgctaatatctctttgagatcctgatttcaattcttttggatgaattcccagagtgggattgctagattgtatggtagttctttattttaaggaacttctacgctgtcttctatagcagctacaccattttgcattcccaccaacagtacgtaagagttctaatttctccacatccttggcaatacttgttttcttgataatagccatcccgacaggtgtgaagtaatatcttattgtggttttgatttgcatttccctgatgattagtgctgttgaggatttttttttctatgcccattgtccatttttatgtccttggagaaatgtccatccaagtcttttgcccattttctaatggggttattagtttttttctggcattgagttgtagaagttccctcatatttcggaggttaaccccttatcagatatatggtttgtaaatattctcccattccacaggttgccttttaattctattgtttcctttactgtgcagaaacttttttagtttgatacagtcccatttgtttggttggtttttgctttaggtttttgttgtggtggtggttgcctgtgcatttggtgccatattcataaaatgattgccaagaccaatgtcatcaagcgttttacctacagtttcctctaggagttttatagtttgggggcttagatttgtccttaatctgtttggagttgattttcatgtgtgatgtaagataagggttcgatttcattcttttgcatgtggatattcagttctccaagcctcacttattggagactatccttttccccattatgtattcttggcaccctcatcaaagatcaattgactctatctgcatgaatttatttctgggctattatgttccatttgtctatttgcctgtctttatgccggtaccatactgttttgtttaccgttgccttgcaatatattttaaaatcaggctgtgtgatgcctccaggtctcttctttctcagattgatttggctattcattgtctttggggttacctataaattttggaattttttttccatttcagtaaaaattgccactgggaatttgatagagttgccattgaatctgaagattgctttgagtatggagacatatatatatgtatatgtttgtttgtttgttttttgacggagtcttgctctgttgcctaggctggagtgcagtggcatgatctcagctcactgcaacctccacctctggggttcaagcaattctcatgcttcagcctcccaagtagtgggcattacagatgcctgccaccacacccggctaatttttgtatttttagtagagacgaggtttcaccttgttgaccaggctggtctcaaactccttacctcaagtgattcacccacctcagcctcccaaagtgctggaattacatgtgtgagccactgctcctggccagatttatatttcttataataatactgtatcttatttttattttatgactaaattggctattcctttttaaagtgctttcttgggtgctttgtatatttctatcaatcttgctgaacttttgttagtactcatagaatgttgattcaatagaattttctatataggtaaacatgtcatctaccaataataattttttatatcttcttattcaatcctaacatgacttatgcctttattctgtctttaaagatagacagggcctctaatactatgttgagatggtaaacatgtaaatggattgtaactggaaattgtaaacattcttttcttctttgttttaaaggaaatgcttctaaatttattcttgtcagtttattttctcataagtttttttgtaaatagtccaggaatttccctgatattcttaatattctgtaaattttatcataagtacttttatattttattttgcctttttatcatgaataaaatgctttttctgtgtcttttgaaatcatcatatgttatgtcttctttggcctagtattaaagtgaaatatattgacacatttttctgatgtactatcctttcaatcttgggataaataaatactttttttctttttttttttttgagacagagtctcgctttgttgcccaggctggaatgcagtggtgtgatcttggctcactgcaagctccgcctcccggatccacaccattctcctgcctcagcttcccgagtagatgggactacaggcgcccaccaccatgcctggctaactttttttttgtattttttagtagagacggggtttcaccgtgttagccaggatggtctcgatctcctgacctcgtgatccacccgcctcggcctcccaaagtgctgggagtacaggcgtgagccaccacgcccagccggggataaataaatactacttgatcaatatgtgttatcttttcatgaactgttaactttggctagctaatattttatttaggaatattgcacttacatgtataagtgaaatgggtttatggctttcttatctagtttgagaatcaagattatatagccgtataaaattagctaggaaactgggcagcttttcttttgttctttttattcattttctgaagcaattaatacaaaataggtattatctcacaaaaaatggtatgtgaggtaatacatatgttaattggcatgattcaactattccacaatgtaaacatattttaaaacatgttgtacataattatatataattttatttgccaattttaataaagaaataaaataagatacataccatcaaactcttgaaagttttgtaaaactccactggaaaactctgtaagctaggggctttttggtggggaggttatagcttctttttcttcagttattattttatatactgctgtaccttacaaaattaggatgatgtgaatgcataaaccatgcagaaagttacatacacatacatacacacctacacacaccccttttagaaaccagagaagaggccaggtgtggtggctcatgcctgtaatcccagcactttgggatgttgaggcgggcagatcacctgaggtcaggagttcgagaccagcctggccaacgaagtgaaaccctatccctactaaaaatacaaaaattagccaggcatgatagcgggcacctgaaatgccagctactcgggaggctgaggcatgagaattgcttgaacccaagaggcagaggttgcagtgagccaagattgtgccactgcattccagcctgggtgacacagcaagactctgtctcaaaaataaataaaataaaataaaatattaaaattaataaaatcagagaagtaatacataattatttattttattgattttttttaatttttatggctgtataatagttttacatttctatggggtacatgtgaaattttgatgcaagcatacaatatgtaatgataaaatcaggataattggaatattaatcacctctaacatttattatatctttgtgttggaaacatgccaaatcttctcttctagctattttgaaatatacaacaaattactgttaactataattgtcctactgtgctatcaaacgtgaaatcttattccttctatcaaactgtattttgttgtacctgttgaccaacccctccgtaacctcctccctgcccactacttttcccagcctctgataaccaccattctactcagtacctccacaagagcaattttgttagctcctacatgtaaggatatgcaatatttgtctttctgtgccagacatattttacttaacataatgtcctccagctccatacatgttgctacaaatgacagtatttcatcatttttttagctaaataatattccattgtgtatatatacgccctattttctttatccattcatctgttcataggcattcaggttgattccatatctttgttattgtgaatagagctgtaataaacatgggagtacagacatctctttgatatgttgatttatttcttttgaatatgtattcagcagtgggattgctagattgtgtggtaggttttattttttagttttttgaggaacttctatactgttttccatagtggctatactaatttacatttccaccaacagtgtatgagagttctcctttctctgcatagtcgtcagcatttattattttatttttgctaatatcattttaactggggtgagataatatctcattgtggttctgatttgcatttccctgatcattagggttgttaagcattttttcatatatgcattggccatttgtaagtcttattttcagaaatgtctattcagatcttttgtccattttttaaattggattatttggtttttactttttttttttttgagacggagtctcgctctgtcgcccaggccggactgcggactgcagtggcgcaatctcggctcactgcaagctccgcttcccgggttcacgccattctcctgcctcagcctcccgagtagctgggactacaggcgcccgccaccgcgcccggctaatttttttgtatttttagtagagacggggtttcaccttgttagccaggatggtctcgatctcctgacctcatgatccacccgcctcggcctcccaaagtgctgggattacaggcgtgagccaccgcgcccggcctggtttttactattgagttgagtttcttatatattctgattattaatcccttgttggataaatagtttgcaaatattttcttccatttcttaggttgtcttgatactttgttgattgttttctttactgtgtagaagtttttcagtttgatataatctcatttgtcaatttttgctttggttgcctgtgatttttaggtcttgtaagccaggggcttttttactcaagatatctttgcccagaacaatgtcctgcagaatttccccaatgatttcctctaatagttttatagtttcaggtcttacatttaaatatttaatccattttgatttgacttttgtgtatggtgagagagaggtctcatttcatttatttgcatatggatatacagttttcccagtaccatttattgcagactgtcctttccacaatgtacattctttggtgcctttgttgaaaatgagtttgccataaatacgtagatttatttctgggttctttattatgttccagtggtccatgtgtcggttttcatgccagtaccaagcaatgttggttactatggctttgtttttaaattcacataatccagtttgtgccatatatcttccatttaccaatccagacccttgccctccctgttctgcctcagaagcatgtatatatgtatatacatgttcccttgagagctagctttcaactgtgttagaccaatctccaacaagaaatccaagaaacaggggagtgcggtcaggatatgtacctccctagttcccttcctggaagtcccttcagacttgttgtttccttgaccagagtcagaagcctggccaaggaagcaacctctaccacttggctatataataggtgtgcttgtctgtggggtacatgtggtcctccctctaccactcattctctctgagttccaaatattgcttcctctgctcatctatttggacctagggatgttaacttctgctattcctggcactgggatactacattatcttttgtggtttccctgcactttgcctacatattcgtaaatagtttctttactaagcccttgttaggtttagtaaaacctagaattatctcagtttgaacatgccatctgtttcctcctgggaccttgactaacatacctgactagtagagagaaaatctgacactgccacttccccaccacacacactcttccagtttaatgattactaatagttttgtgtgtgaatgccttcaaacacagaacattatttgtgagacatataacaccaaagacatatggaagaaacatagacaatgtttttaacatgagaacttttttgaaaaagtgaaaatttctggttgctactgaccatgcctcattttgtaaactcctttcctgatccctataacccttcacaattttagtattcctttgatctttttgatgactcattgtctccccttatgggcttatcttcttaaatgtaggtgtctgggttctccatttttctcttctctcaccaccccccttctctctctctttgagattttatttccttgaatagcttaaattatcatcactatgccaaagattccaaaatctctacctccagccctgacctatctcccaaattcatccattttcattactctctgacagctatccccaacttgaacattctaacagtaattcaaatacaacaggatcaaaaccaaattcatatatttcccactaaattagttcttccacctgactttcccgtttctattctcaacacccccaatctcctcttctcagcccaaaattgtggtgccatacttgactcctgtttgttgcttttcaacactcctatttaggatactccaatagctacactattcatccagtattcatcttctcctttcaattgccacagccaaaatccaatataatattctcatcccagaatttcataacaccctctcaactcagcttcccagagctagtttttcctccccttacacctagccatctaacagattgacagcctgatcttcccccaaaatacaatatttctattctctgatttcaaaaataactgcccagtgttccctgaatttaagtctagacttcatggtctgtatataaatgtctctactatgtgaccttaacctatgcaagcccccatcccagtatgtcccccaggttccagtcaagaaaacttaactagcacatcatactgttttctctgcttatcaaaccttccacacatctctgcagatttacattcttcaaggtccaactcaaatcttacctccctaatgtgcttttcgtaaaactttaattatattctgctttacaatacattatttttgtattgtcatcttatataccagattcaaagttctctgagagcagggactatttcttactcattttttttcctcacagcacctatataagcccccttcacataatccgtgatcaataaatattcattgaataaattaataaatgaaaaatcatcagaaatatctcatttttaataaagatttggaagacatttcctttgtttcttaggatttttttctttttagatgcatgcatagctatattctgtagcatctgtttatttttagactttttaaaggttttagattctgtaaactatgtacagaatattccgttcaacatagggtgtgagattgatcacagcatgacccataattgtataatttctaatcaaaagtaagtgtgactttggcataagccaaactttaagaggaagtaagagtagaataaaaattctggaccgggcgcggtgtctcacgcctgtaatcccagcactttgggaggccaaggcgggcggatcacgaggtcaggagatcgagaccatcctggctaacacagtgaaaccccgtctctactaaaaatacaaaaaaattagccgggcttggtggcgggcgcctgtcccagctactcaggaggctgaggcaggagaatggcgtgaactcgggaggcggagcttgcagtgagccgagatagcgccactgtgctccagcctgggcgacagagtgagactccgtctcaaaaaacaaacaaacaaacaaaaacctcagtctattgggccttttactgaagtacttcttgtggttacttcctccttaaatacaccatccgaatctatcttaacaaaactatgttaattgtatttttacaaataatcagtgaaaataaaaaataaatatgatacttctggatatcagaagttgaacatattgagtaaccagctcatcttagaagctaatctatgaagtattatgtataaaataaaaaagatgtgttgttaaagatagagatagagtgacacaggtggctgagtagatctgttttctacttccatatgaagaaaagcttaaacatgtttgtttatttattccttcattcattcataatcctatactatgtgccaagcactatgttaggcataagggatatcataaagcataaatgtatgatcccttctttaaagagaagaaagaactacaacaaacgataggaaaataattcaaatgtaaagtttgttccaggcatagcagtagcacagaggagaaaaaaacttgtgacagtttcatccttgaatggcttcactaatctagctttctataacttactgtaaaatatcacccactggacaaagccaggaagaaagaacatattataagacttaagtatttgaataacttataatggtttcattgcttggaaaacttcaattcattttggcaacatatgagatcactggtctcaatgtggaagataaagcatacagcattgcagggcctgaaaaagaatatccaattgtaattacagtattttaaaagggaatgctagtcattattattttcagtggtcaggagtgaaaatgcttgtttacttcaagttttagcagcatatttacctaccttagatttgttatctctgagctaaacaaaccattttaatttcaagcaaagccacaaagcattatttctcaaaatatgcatttaattaatagcttatttgctttcttctcacttgactgtgagtttcatctaggacagaaattatttcttattgatctttacatttcatgcctaagcataattcctggcacacagcagacaatacttgctaatagaaatacttgttaaatagttgttaaaagaaaaatgtaaatgtagacctttagctccttaccaactgtcgatattcaagtgttctagtgcccacgatttgcaaccttttcttgtttttttctcctgataagatcaagcaaaggagaaggatttccaaatagcctgatagtgtatcagtgtttcaacaagttaaagccccaagacttaccagggaactttaattctcataaaaagaaaataaaccttatattaacctttacatgtaaactcaaaatggtgcactccctgaaagtattcctcttgttggatatttacgagatacctttgcaaatagaaaactgcagacatgacccctaagcttcatgtaaaatgactgtatttattatttttattttgatcttcacttttgcagtagttgctgtaaatggcttggaacatgcaaaatatgctaaacaagaaacctagcccctacctgaagagttagccgttgaaaggcacaaagaagtacaatggatataaaagcctcttgaagaacagccttttgctgcatagatgctaggcaagacagtatgtggcaggaaaagagttggggaaactgctttaaaaacctattaactaggaatgtgaaaagcaaggaacaattgggaaaggagggaggtgctcactgtttaaaagccttttaaaggtgaccatatttttgttggctttttgcctgcaacataaaatgaggatgatgtactgaatggctagctggctggtgaaggtagaatgaatggcctgggctaggaagtcaaggctgaattttgagatgctactctggactatgtgcagctgttgaaacaattctcagcaacgaccacttagactttgaagtaaagacaaaattcagtcagcctcctcaatcaccctttcatttttgtgtgtttttctcggtctcataaatatttgcctgtgctgtctttgctgcagatattaaggagttaataaattagacagccaacaagcaggaattgggaaaagccacagaacttagaattgaacagctgacagcagattctgcaggtgcaagatgggaatcagctctgcattttctatgtagcacagttttctctgcctggcctgtggcctgatttcctggcctctttgggataagctgaattataagacagagaattccagaagatctagctctgtgatcctatgaactctagcgcttcaaaaggaagcaatctccttctatgtttagactgacaatattacatattggtggcagccttgtaagattttggtttcacgttaggaaagaaaaatgctctaaatgccatcctacttaaagaaaaaatggttgattaaactgcactgcataacaaattagcctcctgcaattgggtgtctaggaatgtgtagtgtgtgtgtgtgtgtgtgtgtgtgtgtgtgtgtgtgtgttatgttaaagggaatcactacttattaaatatataagtaccacagtgaatattaaggccataatagggtatgggaaaggagagaaatgggctgcattcaagtgcatatttctaatcaactacttttttgtattcttctaatcattgtatttgatagtaatggacattcaaggctaaactctgcattgtggcagttcttccaaatctttttggctctatagtggtaaaaatattaattccattacacttgaaaatgtccaatatgatcccttgattaacaaaacattccggtgtttcttctgtgaaggactttgggctgcctgcaagggtgatggtaggagtggctgattgaattgataataggaaaattaatttttttccatgctggtgaatatggcctacacatccaaacccttttgacaaaactattttgaggaatatatttgtaataaggacagaaaaacttggagatctgggatttttttttacctaaatggactccaggaaggacagataaatacctctagttagcaacggttaaaatgggagctaataccaactattaattcccagtttggatcttctctttctctcaggactactttaagtccccaaaattccatgcttccaatttccccttctacaactgaagatcctatgatttaaatcataaaagattagctatatttggacactggccttgtattagtttgacagaaaattctgaaaagatctccccattccaaaaatgtctttctcagactttttgtggagacctaaaattccaccactagaaattttaatatttagagtaatgctgtgtcccttactgacaaattcaatttcaaaacacagtaaaattaaataaacataaaaataaatgtattaaataaatataatttttaagtatttgtgggccaaagatcaggagggaatatagaaatgttatttgtggcgtgaaggtagtagtattacagattacatcttcattttataatttctctttactatgctgataataaacatcaatagggaaaaaaatagtgttacttttgaaggctcaattctacctgaccactgtatctctagctagtggaacctaaaatataagtcaccaaaattttaaaataaaaaaattaaagaatactctcacttagtgatttacaactagatttagggagaaaaaaacaaaactcaacaaatattcacttaaaagttaatgagtatttgctatggagaaggcattttgttgagtgatacagaggatacaaaaatgaccaagatctgcaacccccctctttcaaaagcttatggcataaggctagtaactttgaagaaaaagcacattgttatcagtcatcagtatattttggtgaatccatctattagccatttgtttcagattttgaaaagctgaaggatggggcaagcctaggatactacctaggaaagatcagcctggattaagacacttaatgaaagaagatgagggaagtaggcacaagccgggggaggcgatagcacaaaagagggtagaagatgagagcacgctgactgcaaactgtgtgtgtttcagagggtggatttcctagctctgacttctagcaaataattttcaaaatgtaaagtggaccctaacaaagtactattcttatcaatccaagagtgccaagcaatcaaggagagagatttacagacaatgtactttcaaattcacaatgcaaactctaaagtaatatgtattttcttataagcttaactttagtaaagaatgatttttgaagttcactcaaatatctaatatttgcagatatccttatttcattactttgctccaaatatttaaaaccagatgaaaaaaagtaatgtccttaaggagtcaaattcattattaaaataagatattttccaagttgtttggaaaatggtttactttctttttttccccctttactagacctcaaaatacactgagttttcctcactggtaaagaaataaaacattgagaagtatcaagtgaatccacttgaacaggcttcaaaaccataccactaacgtattattttaaaatgtttctctaagacgcatttattacaagggaacactctttaggaagcattaacactcacagtccctaaattttaaattggtccctaatattccatttggtaatcaatatcctcctttgctcctcccccaccctctcagatggccttattctctgtcagtatctatcacattttcttttttcttttatcaccttcttcattcttaatccttccttttgggccaagctgtctgccctttatagctatatttacttcctccttctctttcccctttaactctttgtagacctttagattatgaatgctgaaatttgtgattcattgtttttgccttattgacctcctattaataaaatttgcctcctccacaagattattctaagaaagcatacttttaagcatccacaactattgcccaaagagagacaaccatttggttcaacttcatatgtgttaagccaaatgtattcaaaaatgatttcctactccgattcttattcagtattttctgtgattctcctttattatacctttctagtgcaatggaaacttcagctatctgtggtctagtctgaactgtacctggggtagtgacaatggccttctgaccctatggctcttcctgactgtggatagaattgatagcactttttcaatttctcccttgtctttgcttgaacatactggaattacaacctctgacaaaggtaacatcccttttgtagtggaaacaaaaggggtgtgtaatgaattggttaagattacattgcatgtttagatgatgaaatccaactgcagctcaattcctttatttcctctcgctggacctggtctttcaataagacattattgactggcatcttccccagaacaggtgcttaggaatatagtcttgctgctttgagtcctttagactggaaaacaactatggaataggtcaagagaatcaggtatgagacaataatgcccagtatcttaggacatccactgtagatgattcatatccaggtggtattaatggaataaagggtccttagacttatatggggagctagagcttttcaaattaactaaggtggcaggatatgagttacaggtttatttgccatttttctgcaaaaattctatgaccaggaggagatagaggaggaaggcaatttttaaaataattcaccactatagattgtgctataatgatattataaaaggaatttttaatttttatgaagatgaaatcaatgccacaatgtgtggtattaacaaatgctatctttttaccacaaatcatatcacctttggttactctggatagcaaattattggcctctttcttctttttcccttaaattactttggcttgtggtttgtctttttttttatttttcaaaaacaagatcgcttacaatttttgcttttaaaaatgatataatacccatattggctgcagaaaatatttaaaatgtgtgcttttcaaagaatgatcagatcatttattcatctttagataaagatgattatattcatctcaattatttttgccaaggactgtaacactaattttactctttctaaaaattaaaatagcaaacagtttatataaggtgttgataattacctatattattgtactgctgtgacagatgttggcaaaaaagcctaaaatgcctacagctgtgcactccatgacatctagtttatactcagacagaaggctaacagatgttctgaactgtcactttgcctaaatgtttttaaagtctaaggacctgctttataattcgccggagtctggtttggtttcacagaggttctcagaattcccatctgtgacaattaatgctgaagacattgataaatcaacccttgtgttttctctcttctttaacagacatcagtttatacatggatggtagattgtgaaggctgtttttatatacatcctgtttgtaaaattatctccttaaacacagatagaattgggctataagaatacatggaggtttgttttgagccatggaaagggccaggaaatcacctattattttctttctgctaaattttatgcaccttggaagtaaaatgttaaccatttccaatgacaattttccaaagttatatttgttctagtgaataaaaaaagtttttatttttattcagcatgttaacagttctgctcataacaataactcttaattgtgcagcctgttagaaaaatgaaagaagacaataaatggcattgagaaaggacacagcacatcttctccagcttgacaccctaatacttcctcttcccaaacataccttcagatccctcatacagaattactgccccgtgcaaaggccatcaatgccttatttgctgttgctcttaattttaacaagctggattcctgtagtacacttgcttaatagtttaaacattctgttaacaatcaggtgtttggcctatcctgtttctcctctattctgtaaagaaatataactccaaatagtacatctttctgggtttgtttctaaattagtccccacacttaattatgaggatgagagggatgccttattcctctttgttataggctaagctctcagtaatcccaaacaaaagagccagttctggaagatataggatttgctagcaggattatggtctcatagataatgatgtgcagtcagcagaagcgaagctttattttaattcaaataagctagtaaacaaaccactgacaagtctgctggtgagagtaactggctgctgttgccacattggcagcaaaattatagaaaatctattataccctgttcaccatatgtttaatttaatacaagatacaaattaaactattcacagtgcctattaaaataacaatacttttttatatttgaatgttttaaaataatttctactgaccttttaaagggcagtttcgatataggtgactatcaggggtggagggaggtagttaataaaaggcaaaaaattgtaattgccttcctgaaaaaataaagtataaatgttcactggtttgcatatgttaataaggttaattagcagtcatgtgttctgctactactatatttccctcccatcctttgggtttctgaggctagagttttaagagtgatacttagtttgacctatgtgagtctgtcctcatgaaatcattacctggatcaagccagcctatgggtagccttagaagtaatgccaattgagacctataatctgaaaattgagtttaaactctaggcccaactttggtatggaaaaaggcacagacttttatattattgcttttagtcaatttctccgtagccaaaagatcctaaggggagccagaattaagaggctttcttccagagacaggagagaagaaaaagacaagcccacaacaaatttgtttataacaaatttttctcttgtacccacaacagtcagcaaccagtgatgcttgcttgagtctatggggactcagtctaccagattctaaagaccagactgggttttaaagttatagagctagatttgaatatctattatttcccagctgtgaaaccacagatctttaacctagctggatcttcctttattctgtaatgaggggacgttggggtgaggggaagtataataattccaattttatagtattattatgagaagtaaataagagaaagtatctggtacataatagatactcattaaagattggttcctttcctctttcactctcaagcaaatagacatgttgccctttcttcaaaggtgaagggagagtgttaggaggaggagctggagggggagatatgaacaaaaattcgtggaatcaatttctttggatcattaattcctttctacctccaaaacccaaaatggcattctccttttctctcaaaattcaccataatacttactctctttaagactgtattggtaagccacccaaaccagctccctattgttgggcatatgaattagaaaaataaaatataaccattgcactttgagatatcttttccaacttttatgtacagattttgcactgagtctacaattgtgttcatggggttgcctcatgtgaattttggttcagagaatagaagtctagcagatccaactacgtactggtaattacaatatgcataaggtgtacacttggaaaatggccttagtttcaattgttcttgaagtccaacagatgatattaatattttacccaaaaaactagtaaatttatctcagattgatgcaagaagcgattttcaaagcatggtcctggtaaggatatgccagagaaacaccagacaaatatccatggtcccttcccctctctccagtaacctgttattcagaggttgagagatcagagatatttccatttattgaaacactggatatatagttaaattaagaaactgaaaaaaaaaaagggtcacaaaatttgtggcatattttaagtgtttagcattttaaaattaatacttttaacacatgaagacaaaacacgattgtacgtataacttcattttgtatataacaaaggaatttaaatggatttaaaggctctccacaggccttgcttctacctctaaatttccacttagttacatccttctctagtccctgttgtcaggtcccagagcataaaacagactgagggagcctcagagctccagaagtgtgagaagggtgagaaggcaggccatgctggctaggtacatggccacttagcagacaggccgccagcgagcctgcactgtcaccttccccacctcaggtttccaggtccgtggctcctgacctgagagccgctctcttctgagagggtctcccagtcccttgctggcccaatctcggttcctgactttccacccccgaaccctccccgctctccagggaaccacgatccagccctccagagaggttctcctgggctcgccgtttcgcccacggggtgcggggaacgaacccaactggacacactgtgcacccggaaaaacagacggttccaaattcatttccgcatttgagtctagagtcagcaagatcttggccgcccgcctgcgcctcggagcagcccacgagcccgtgaaggcgcgtggggaaggggggcctggaaagcccgggcttcgactcactcggccagtaccgctccgaggaggggcctcagcctccttcggagccagggccgcgcccgagccgcgctaggccagggggccggacgcgcacggaagggggctggcggacacggccgggtggtggcgcagttcctgggggcacagggcagcccagcccgccggcccgcgcctccgcttccccactccagcgaaactggacaaggccgacccacccagccgggcccgatccctcaagacactttcagcctcagcccccgtttctcctcgggtttccacagacccaggaaaggacagaggcggcgagcaggctgacaagtttattctagaggctttgaaaaatgaggtttccaggtctcttcgcacgcgcgcgcgcgcgttctcgggctaaaggttcgaagctagagtttgaatttaagccacgtcctgggacaggtcgcgttcagcgtgggcgtcggccccgccgcggccccaggcctcttcgaagtgcgcgtcaagtggggtgtcgggtcgttttgttttttctctaagtgaataattcaatcgtgttaggccagattacatgctcataatacccaggtgtatttaaaagcacccgcgtttctaaacctcccgcagaaagtgggaagcaatcgccccctcggacctggcgccgctgcgcctgctggagcctcgcttccccacagtcgggcggccagtggagggcgaggagcgcgcgcgtcacgagaggcggccccggcctcccagagcccgcaccgggaggccgagggctcgggactcgagccttctgagtccgatttctttccacgtgcagagggtagaaagtggccagtcagggcgtgattgattgcttaaggaaagagaagctacagctttcacggtagttgataactaaagcatgacatgatgccatctgtgtgaaactcgtgatgtgtgtggtcattggctccctggaacatccagaccctgatcgtgcgtatcgtgtttccttataagcagcactcgcgatttaaaaacaggtcccggtgcccctcttgctgatcctctctgccattagcccgcttaattccctttttgtaaattcccctctttacctttctttcgtccctccctccctctctttcttctttcctcctctccttttcccctttctctttttcttcctcaatctaggtcgtttctgctgaatgatatttattcaccgaagtcccaatctgagggtgaggggaaaaccccaccctccacatctccccagctaggcttgcgcttgtaaaatatggggttcagctttggctccagagcgcttttgaacagtaaagtttccaattcagagccacctctaaataaatgcccataaatttcccaaccccgtgagaaagccatttctacaacccagcatcgtctgggtgatgtgtgtttgttccaactagagaggcactggtcagtcacctcagtttctgccctccggatacagaaagtgcttttgtttgtgttttttggtttgtttattgtttgtttttttaaaagcagctttccagttgtagactactggttcctgattccctcatctatcaagacagtttgtcagtttggccctgcaccttgcgtttcacattctacattttttagttaaacgttgaagcctttccctatgtcagatgggatgtcattgcattacagtttttgagacaacttttgcggacttgcctaaaaaaatatgtcgtcctgatctgccacaggagagcgaggtcaactgagggatttttcagctttcttatggctgggattgaatagatccaagtaataagatatctcaggtttcctcacctttagtcaccttgggctactcatggatgcactcctatcttacagtcttagattcagcccaaaacccctcagtggaaagaagacagcagttcagattcttctttcaggttgttgtaaaaaaaatgaaatggctttttttcagttaggagcatcctttgtaagttttgatatccaaaaaatacatatgacacaagaagcaggaagagatcttcagttattccagtggattacttttttatgaaaacactggctaaaacattttacattcacccttcctcattccacttttagttggaagaagtttctagtattgatttaattttgtataaggcccctaccctctcctacaataccattaagtaacaaattcacccaccttagccttttctggtgaaagtcactcttgatttactctcttcacttcccttctacccccaatgcactcacacttttacagacacatttttcttgatccagagagtattgggaggtacataactttttagtattgtcttgactttcattcttttctaactgagattggactctttatcctgtgatacaaaatgaatttttgagaaacaaccatgtgaaaaattacttaattttctgttttgatgtatttgtttttcaagcttcataggaaaggctttagttggtgtttaaatgatagtccataaaaattccttattagatgactccagaccaattgtaaaccaataacataattgtttccaaaagggaaagtggaagttgagatcagttagtcgagggattcatttgagtgtgtttatctttaaaatggtttatgagaagaaagggagaaatgaactgggtggaggacagaggtagagaatccagtgaaaacatgtttttaagattaaagccatttttccacattattttcttgccacaagtgacaacacagagcaggagtcatgaaagtggattactgtcactctgggctattggaggcccagagagccctggcattaattcctatagaaaggtagacaaacctagtcagtaactaacactgtcccccacagcgccctcactgccaagtgttcaggctctctcagagttgatacagacctcaggggggtctaggtggcagggcttcccttgtgagaggaagcggaggctctctgtggaactgagagggaggaagccaggtggctgtaagagcaagcctgaggggatagggtgctgtaataggaaggctgtggccaccagtccctcacatggctgcaattagtgagtcaaagctagctaatgatgaatcaaaaagagccaagagtaggactttctgggtgctaaagactaacctttagcttgttccactcctcccactgggctcccatcctaggttttccaggattggagaccttactggaggaaagggcaagtatgttaagaaaacatgcctagcccctgtctagcatgcgcatactggcggggtcttgcagagatggggagaaacaccttgggatgaaagaagccctcagtgatctgtgtgtctggctcatacagttgtgcacggccaaccagagagtgggggagagtaaagcctcatttttttttcagtcactctatctggggttgcttatctcctctcccccaaccctctgcctcaccccaccaggaccaaatagaattgaaacttcattgcctttgcctgtactgagcctaaaaactcagggtttgataaggttactgcaccaatgatacaattgtagatttttaaaagcctcctcaaagagacagatgtttgggctgattaagaattgaggaggaaacctgcagctgcaccaaggaataatctattggacaaatattgtaataaaaaaatatgaagagatcagcccgaccttgcaaggtcttctgctttaaaaaaatctttatcaaacccctattctatggcttcaataaacagaacccattacctcacggcatcttttgttggccccatacaagagagaacaaaatggttattcaggggaacgctttcgatttttattgtgggtagcctgcacaaagagccgtgttattgtatttaaaagaaccatctgtagcagaaacaatggcatcaaattatctttgaatacccactgaaaaaacataaagcttttttttttattcttcttctgtacggtggggggatagagcagtgttaggataactgacttttttgttgttctctgggtgcattcttctcgctccccctctctctccccctcaccctctctctcttctctctctccctctccctctctctctctctctctcttttaaaaaatcagccatttggggttttaagccataaacgatttttcttgttgcaggggattgcagtggcaaagctaggctaggtcttggaggctggtgtaaggcgatgtgggtgaaggcaggaggctgatggaaagactggggggaagaaaagccgaaatggattcacggtgccttggatgaaggacgagaggggaactgcaagctccttcaactggttctgtccggtgagaagtgatcaagcttgggctgacaagaggctcagggagccctcacgttctttcgcttttttacctgccaatcaaactgctacaagacaacaccctgatctggcatggacatgtaagtagcttgcaacccaactttgacattcactgctagctcactcctccccccacctcactttcttccccactcattctgtttttctttcttttttttttttttcttttgacctttaagagatctggaaatacaccctgtgtggcagtcatttaacactggtagatttaagtctgaaagcgttaacttttggaattaaattctaatttagatttaacaaatgcagaaatgaaatgacattatttcatcctattttggacggttttggtactgaacttaatcagttgtcttacaagggtgtgtttcttttactatgaaactgaagaaatagatctgtgagcccccagaaagaaacccactaatgaaaaattcaggcttccatcttaaaaatgttaaactctagcatttcacccccataaagaacctcttccagaccaatgttactaaatggaaagagtgatttgattcaaaaggtacatatcattaaggggttgctactacttcaatcggcgtcttaactattttggtggtggttacgggtagggggaagttgcaaaacaagaggaaggggacatggcgatacctcgttttttataagagattgacatagaggaagatagaaatgcatgggggcagaataagcaggaaatattacctgagagaaggaattacagagcatggcgaagctggaaggtgggagggtttctgcgggaagtcgagcgaggggtgatggggcttgctctttggcgccctctaatggcaacttgaaccaatgttttactttcgtaatgcagtactgggaaaagcagctgggtttttgttattgctgttggtttttttcctccgcagacttagaaactagagactattagtggagtaaattgattgttttcagcctaggaacttatatatatatgtcttaaactcaccagtgtttcctcctcaaacatcccctcctctccctaaatcttgttagactaatagaagaggacaggctaatggcaaattgacttatggagggtggtccacgcccaattagccattgcgggcgggggagagggtgtaggattcgtttcctacctgaacagcattctgactcttctaacatactcgagaggtgtagggggtggagtaggaagggatgatttggaaattgcagattctgacatgggctcattataatacacttttaagggggctcttgggaacctctgttattgcgacatgtggtggtcagggggctttccttcccgccttctttttcttttttctttttcttctttctttccttcttttttcttttctttttttttaatttgatagataaaggttaatcttgggctgaatgatagagctatgattgacaagagaaaaggtgttgagggcaggtcgcgctgtcttatttacagcccactgcttgctgtagagtctttgttaggactggaaagctaatttagtgctgatcaaaagcaccacagagttaaaggactggtaatgactgctaatttcatttcagcctcatgcatccccaactgctgtaattaaagacacgctatttaaatacaggtgaagggttttttttttttaagttgggttgggggggggtgggtgggtggattacaattttatttagatcttctactctacttgggtgttatgtagtcccaaattagattttattattattattatttagagccgctccttgtcatttatacctggctttgcagaatcggaagtgtgaaatgtgtcactcacataaaagcccctgtttaaagaaagggtgggacgggggagtgcagaggagtaactatttaggggtgatttaaatatttaggtctcctttttttctccttcaaattaatagaaaggccttcgatatagttaaaagtatttgaaactgggggcaaggttaacaggccaaagggatcagtgtcagctttttaagtacttctaaaaagatcatgtgaacagatggaaaaatatatttttaattaaataatttcccccacactatagctgcagtgttggctcagaaaccgtgtaatttctcatccgataggagtttctttatgagaacatcaaaggataaaaagctctgcattttcgtagttggttaaaattgataaccacccccccatgcgcgcgcgcgcacacacacatacacacatatacacacacacacaccaacacacacacacacacacacacacacacacacacacacacatatccccaaaaaagaatttagcctttaatctctttttatccacgaagactaaagctctgtactcgaccccgcgagcggctctcgccttccggggctggaacccgactcagatgtgaagcggcactgagccgctgcgcaggttcgtgcccagcgccccctgttggacacagtaggagctgcgcagcgccagtcccagaaatcgctggaatcctgctctggggttagagaaaactcttttattgccctccaaaaaagaaacgggatgcgaaaacaaatttttatatccttgaaaaataatataatattaactcaataaaaaactaaagaggcgatactacaattttaattcaataaaaaataaagactgtcctcctcacatcccagccatcccccacccggtttggttttgtaactcttttgaaaggttctgcgatggtaaaacaggtaaagaaaagtgacgaaaaacaaagcatttttctgtagccgtggagaatcaagcaaagtatacttcctccgttttgtccacatttcaaaaaattaaacggaagatgctgctgcttgctgttttgacgttgtcagcagcgtcttgaatgccctcagaggtcctgcaagtatcgtaactgagccttcgagtaaacgaaataacttgcttttatgtgtttatttccagagtataattaaaagaccagtctcttctttgagtgtttcccatcccctagaccaatcctggtcaaagtttttccttcccagatactggctaagaaacacatactggctaagaaacaggtgcctggtatcttttttctttcatcttagccgtaggatttcggggaaggtgtgccaatggtagggaaggttttctttgaaattcagcatttcgttgaccaggaatccaaattatcctagggaagggggagtatttttacacttccaaaaaactacctgtctacataataaagagctttgccttttttattattattatttcttcttcttctttttggtcagcaagtgagggcaaaagtagcctttgaattatttcagaaagagaaactgtaaaaatggcacatcctctgaatttaaaacaatagggaaatgtgggtttgcttaattgtttaaaatcaaatagaaataattactgtgctaaatgaacaagatgttttaagatttacatcttcagggttatggttattgattttaactttacccttaagaagtttagagatcgcgtttttaaagtttgcttattgacggaaatcggcttaatttttcataaaagaatggctttttaaaatattgaatactatggctatgcaaggtttatgatacctttatgtttattcttcccacctcccaaaattagcgaattcgagataacatttcaaggggaattgctatttagtgcgatgagagatgacttctccatctggttccagaattagatctcggcttaggttttttagtaagtaggttcagatgcaatggaaggagagaagaatcaagccttttgataaaatctctaccccgaattctatggaaaagacaggcaagcgggattccagccacagcacccccaccttttgctctaccaaaaggcttgtccccattacagaaataatatagtcggtgctagttttgtgaacccgcgccaaccgataaggtaagaaacggtgcgctgacagccgaggtccgaaggctgctcagtggttcccgcagcccgtggggtagggaggccaaagccagcaaaatgttggaggcgacgccagaaagagagtatatgcctgctattcggaagtgatgtcgaacgtgcaatagcagagtcctggagatttccaccccgttccgcacccagggatcccagcctgtggggtagcaggttgttgggtgaaggcaggagggagaagccgcacctggctgagggcgggtgggcgtgccgggagcgagtgcccaactttctagggcccatggagaaagcataacccctagttgaggaaagagagctaaacaagtgggtggcccaggcctgggaatgccacccagctctcccgacgcagtgttatttctgtggtcccagggggccccagcacctgcccgaatcccactccccaaggccgccagcaggaaggcagcccctccatctttgagggctgaggagggggcagcgagtgacttgattccttagtagcagggaaaaccgcagcggctggcaacgggccgcgtttctccgcggcggcaaagcgccctttaggggcggggcgggcatttttggtctcctgtcccagcgtccaggcctgagcccgcgcgggttggctgggcgccctgctttgtaagtaaccaatcttgctggattctgaggactatccaggcggatgggcccacttagcttaggcccactgagaccctgccaactcctcagacccttttccccttcatccctcacacctttcatgatgaacccaggaaagaacccgaactctgaaaaacagtacatgtggtttgaagtttgatagttatttgggtgtgagggacatgactctattaataaagactaagattcaaggctgagctctcatttattaaatttgctctttcactctgttttcaaactctggagatctttcagtttcgttgctccaaccctgacacagacaaaggcgccagggagaaagcccaggcgggcttgaagcagttgaggtatagactgatactcatctctccatcactcagacgggcagataagcactgccagactgggggtcctaatccagggcccagcggctacgtgggttgctgcggggtgttgaaaccacaagtacaacttgacaccattgagcccacggtgcttgtcaataatctgtgaattaggtgcagagattgtcactgtagatcataacagtttctgaaggactcattacagcctatcgtgtcaatgatcttcaaattaaggaggggaggtggggcgagacgaaaaaggagtggggagagccagcaaaaagggaagaagggtgggagggaagataaaagtcagagccccagctccgaaggagcctttaaagattatcaggccagcgatctgagaattccattgggatgggtttggaaacccaactccatctgagccaggactggaagaggggcgctgggggcaagcagaagtgggcccctgggaaggccgacttctcaggcatttcttttgaggccggaatagcttttgggagagggttctagatgtcaatgggaggccttgaggatgccagcccgcccaggatgggtgtacactttgatttagagcactttccagggcaagccgcagctgcagatctttgaaaaaagtggtaatagtttcgtttagggatgatggtgattgtaggatgactttttttttccaatggtttgctttaacttcttttcatgccacaggtgaaagctttcttccttttcctctgatagtattcctgtctgtccctcacatgttacgtagatctaatttctttccccaacttgtttttttgggtgccaaacacatcagccctctgagattttatcacttttgtggtttgtattgagtccaactgtaattctggaaagggaacttgtggataacacagtagcagtatgttccataagattccagaagaaagaagactaaattccatttatgcggtgtggcaggggccaggctaagggaaagaggttttccctgcttggtaaattgtccttgcagtgaaagggtagcccagccttcactggagtgtcatttaatactggctagagaaaggttaaggaaagtgtaggtttgtttttcccacaaaagttgtggtcacaactaaacgaagtaatcacagttggagaatttaaaacaactgttttttctctaaaatgagggtaataaccctagccactggaaaattgggattctaaggaaaaccttttcctttggtataattaattgcataagatagtgtggtcaatcagagacatatgtatttagactcaagcaatgatttacaggtgtaaaaggtccagtggctttttgggctacctggagttcctactgatcattttgccttttaaaaaattttcttctaattttaaaaataaaagtcatagatttaatgcaactgaaaaccactgatggcagctcttcaggttttcagtttatgtttttaaagggaatttatatttaaaataattaaatcatttaatggtcacactacattttctcctggacaacagctgtagtgcagggatagaatcttaacttacattaaaattgcttgataattcagaaatggaaatgaaattgtgaattaatttctccagaaaatatttgagctagaatataagaaggatgttcatatataatactgtaagtaacatgatgattattatatgcagcttgaaagacctacacaaatgattatatactacttctgttgctataatttaaagtaaggggaaatatatttagttttataactattgaattcttttcaaaatgtatttatttcatcaatgagaattagatgagagagaatgagtaaaaaggggagctgaatgcaaagctgttctgcattccttaggtttcaagggtacttacagctcttgagtgaaattatttggtgaaattgggtctggactgaaacagcaattgttatcccttgttcatttgttaagtgtaataccacttctggaaattaaaggcaaggtgctgaagggacagacaagaagaaaaaaatatgattaagcaatttgaaattgccaatgtaccatgcagccatatgcatatctctatcttagtaaatagaaagggatagagatatatgtttattctttttatcatctggaaacattcattatagttactgtcactaatccttcacacttccaaaatctgacaagtttgacataggaaaaaaatgggggaaatgtagatgaaagagtttctatcattttgaaaattgtgttataaaaattaagatgtctatcccctctaggaattcctatgagggatccttcacagtctaaaggaaatgaagtttgacaatggtacaattcagttttgaatttttgctcttactttctatatcctaaccttttccagcttatttcttgttaattgtttttggaaagtatgcaatgctcttttaagggaaaaaaaatcttctaatgcacttatttaccttcatttatatgtgtttgtttctgaaatgaagaatcaagctttggtcattccggaagtcgtgtagcatgctccaatttgaagtgactgagatcttttgtgacttacagaggagaaggaaatgttttaaaaattggcttatgccagtctccttactctgaaattctcaattttcttgtattacaggataaatataaatatcatctcaccaaattgtaccagcattgtcctaaacatttaaattttcctttatttttggcctttaaaattagaaaattttctccagttgctgcacttagctttttaattttgttttcttttcacttaccagactactggtatgatctctttcactgcagtatgattgctgctatggtcacttttagaggagattgtgggaaggttaggatttggaggaaacatgacaaaaaagggaagaaaaaaaaaaaccttcatttgaccacatctggctgcttgtatatttaaccagttctagaattagaaaacctttctgtacattttcttctatttttctcacttttttccttacataatgaaattaaaacttttggagcctacagttgacatttttcagaaaattgagttatcaaggcagtaattatttcacggggagataaaactctcatagccctaactgtcaaatagggcccttttcagattttaattacaaaataaaattagtctgctcttcctcagaatggtttgtgagtggttaaacagagctttcccccaatactggtggtcgtcaaactctgctaattagcaatgctgagaaattccagttaacaaggacattctccaagactctgcaggttccctgccgtttgccttcatttccataagaagattaagagaggaggggaacacactcaaatgcagatgcagaaaagaagcgttttttaacaagcatcataatagtaagatgcttggctagttctcacctaattactgcaagttaaacctctatttgacactaagaagaaaaaataagtctacagtcccctgtctccacaaaattgttagttggtttcagatataatacttgaggagtgctgaggagactttaggagagaaaaatcaatgtgcaagattttgaaataaaattgagttacacttaacagttaaggccttttggctagggcctataatagaacaaaataaaatcagaatattccaggagtcatgcatttttgttactaactactaatcttgctctaaaagtatgtagctttttgttgcccgtggaagggaagtgttacactccctttagattaagcactttcaattttcgtaaattgtgccaatggcaacattttagattctcagaggatgaagcatcctgttccaagtcttttttgattgtctagtagtcaatggtatattgttgttagtactgtagctgtctattacaaacctaaaacagtgttgcttctgtcatctattggaatcgttatagttattatatttagggatcagtgatggtgctggattgaaatagagtgggcagtgatctgattttttaaaatgcatatgttctaaaaaatctaatgagaaaatgttcctgctatcaccatcttctttaatcttattttcatagcacattattatgcataatcgccagccacagttagtttattgtctcgataagtacagcaggcttaattaaaataaagctgtaaataaatgcaaccaatgataacacaattgtaacgtaattccatagcttattaatgtgataaaagcaattaataaaagacctagccaacccctttaacctcttaaatacattattatagagttcatgcacaaacacatgcatctgagaatgtgtaaaagttgttatatatcctcccaaggaaaaaaattgtgccttgagagaaaggcaacgagatttaaaagatttgtgtctataaccgtctgttattagtatttattttaacaaatatacaccacccttatccacaccaattccttggttgtttcttcaaacaattatccacaagctttttaaagtttttagaataatgctattaagcagaccgatgcatacacaatcataaagtgaattcttggtctgccctttgtggcgtctggacaatcataattcattcacatgttgaatctcataatttgtacctattttttcccatggtctaacctcccacttacctcgaggttgtatgtatatttctaagttaggcaaattaaatctgattcttatgatttggttccgcagcttataagatatgttaacttttcttttgtttagattatgtataattagtctgatcttccatccccctcttttttttttttttactttaattattttcaaataccttcttttaaaggtaaaagcaatagtcttggaaaagcgaatctaccagcagggggcgcaccagccacatccctgaaaccagccgcgctgaaaagccggtggccgccttctcttccccagatcttctcaaccttttctctttcctaatctccaggtccgtgtttaccttaatattacacctggattaaacagaaaacagtgctgtattttgaagagcgccgaatatgtatgcattttgagaaacccaatctcaccctttccgggttcccaagaactaaaacaagccataacttgagagaaaaaggagaaccttcggggggcaggaaggttgattggaaataacttaaggaaagtctgcagaattcttttttttacaacttttctgagtttccagtgggtatatttagtgtgagtttgacagtaacaggctagggagggcagagattggagaaattgggggtcgggggagtgattatgggaagaaggttagtaaggaacaaaacaatgcaccgttttgtaaagataataaatggaacgtggctggtagatactattcagtacattttcttagggtgagtaagggtagaccaggggaggagggggcggagagagtgttacagaagaaagaaaataagtaaccctgatggtttaagccctttataaaaaagaaatggcatcaggtttttttttctttattcccccccaccccaccctttgtagtcaagtgcattttagccacaaagatcccaacaagagagtggaaggaaacttagacgaggctttgtttgactccgtgtagcgacaacaagagaaacaaaactacctatttgtaacggacgtgctgccattgccctccgcattgagcgcctacctattgaaatctttacgtcgggacaatgggagagcggctaaaattaccctcttgggtcctgggcgggcaagattcctgagcccctacccccgcccccatctcatcctcctctaacccgggccttgctgggctcccccttccccagtcccggccgccttctcccagtgtgcgctgcctgcacctgtgcctggagagcatcgaccccgcctcccaggccttgagcccctttgcggcgcagccccagccttgcgcggcctgggctttgcggccaccacaatggaaatctacggggaaaatgccagggctggttctgctggagtcctgggaactctgcgtgggagggagtttgtgactgcggcccaaaagccacctccatacagtgccgtgggatgccaggaagttgaaatcaccctcccccatcgcctgcacttttgagcgcccttccgtctgtgtctttccccagcccccatttgaaagccgcacgaccgaaacccttcttacggggaggcatgggatgggaatggggagtgggggcagacagtagaagcatcccctttgctacggttgaatgaagacagtctagtgggagatgtggctggggctaagaggaagagctgcagtttcctgggccaaagagctgagttggacagggagatggcagcttaccaaggcctgctggttctcagctctagagtctgccttatggtccgagcaggatttatttttaagaacagagcaagttacgtggaagcaaggaaggttttgaggacagaggtttgggtctcctaacttctagtcgggactgtgagaagggcgtgagagagtgttggcacctgtaaggtaagagaggagagcggaagagcgcagtacgggagcggcaccagaggggctggagttgggggggagtgctgtggatgagcgggagaacaatgacacaccaactcctgcactggctgtttccagaaatacgagttggacagccgccctgagccacccactgtgccctgccccacccccgcaccttagctgcttcccgcgtcccatcctcatttaagtaccctgcaccaaaaagtaaatcaatattaagtttaaagaaaaaaaaacccacgtagtcttagtgctgtttacccacttccttcgaaaaggcgtgtggtgtgacctgttgctgcgagaggggatacaaaggtttctcagtggctggcaggctggctctgggagcctcctccccctcctcgcctgccccctcctcccccggcctcccccgcgcggccggcggcgcgggaggccccgccccctttcatgcaaaacccggcagcgaggctgggctcgagtggaggagccgccgcgcgctgattggtcgctagaaacccatttattccctgacagcccccgtcacatggatggttgtctattaacttgttcaaaaaagtatcaggagttgtcaaggcagagaagagagtgtttgcaaaagggggaaagtagtttgctgcctctttaagactaggactgagagaaagaagaggagagagaaagaaagggagagaagtttgagccccaggcttaagcctttccaaaaaataataataacaatcatcggcggcggcaggatcggccagaggaggagggaagcgctttttttgatcctgattccagtttgcctctctctttttttcccccaaattattcttcgcctgattttcctcgcggagccctgcgctcccgacacccccgcccgcctcccctcctcctctccccccgcccgcgggccccccaaagtcccggccgggccgagggtcggcggccgccggcgggccgggcccgcgcacagcgcccgcatgtacaacatgatggagacggagctgaagccgccgggcccgcagcaaacttcggggggcggcggcggcaactccaccgcggcggcggccggcggcaaccagaaaaacagcccggaccgcgtcaagcggcccatgaatgccttcatggtgtggtcccgcgggcagcggcgcaagatggcccaggagaaccccaagatgcacaactcggagatcagcaagcgcctgggcgccgagtggaaacttttgtcggagacggagaagcggccgttcatcgacgaggctaagcggctgcgagcgctgcacatgaaggagcacccggattataaataccggccccggcggaaaaccaagacgctcatgaagaaggataagtacacgctgcccggcgggctgctggcccccggcggcaatagcatggcgagcggggtcggggtgggcgccggcctgggcgcgggcgtgaaccagcgcatggacagttacgcgcacatgaacggctggagcaacggcagctacagcatgatgcaggaccagctgggctacccgcagcacccgggcctcaatgcgcacggcgcagcgcagatgcagcccatgcaccgctacgacgtgagcgccctgcagtacaactccatgaccagctcgcagacctacatgaacggctcgcccacctacagcatgtcctactcgcagcagggcacccctggcatggctcttggctccatgggttcggtggtcaagtccgaggccagctccagcccccctgtggttacctcttcctcccactccagggcgccctgccaggccggggacctccgggacatgatcagcatgtatctccccggcgccgaggtgccggaacccgccgcccccagcagacttcacatgtcccagcactaccagagcggcccggtgcccggcacggccattaacggcacactgcccctctcacacatgtgagggccggacagcgaactggaggggggagaaattttcaaagaaaaacgagggaaatgggaggggtgcaaaagaggagagtaagaaacagcatggagaaaacccggtacgctcaaaaagaaaaaggaaaaaaaaaaatcccatcacccacagcaaatgacagctgcaaaagagaacaccaatcccatccacactcacgcaaaaaccgcgatgccgacaagaaaacttttatgagagagatcctggacttctttttgggggactatttttgtacagagaaaacctggggagggtggggagggcgggggaatggaccttgtatagatctggaggaaagaaagctacgaaaaactttttaaaagttctagtggtacggtaggagctttgcaggaagtttgcaaaagtctttaccaataatatttagagctagtctccaagcgacgaaaaaaatgttttaatatttgcaagcaacttttgtacagtatttatcgagataaacatggcaatcaaaatgtccattgtttataagctgagaatttgccaatatttttcaaggagaggcttcttgctgaattttgattctgcagctgaaatttaggacagttgcaaacgtgaaaagaagaaaattattcaaatttggacattttaattgtttaaaaattgtacaaaaggaaaaaattagaataagtactggcgaaccatctctgtggtcttgtttaaaaagggcaaaagttttagactgtactaaattttataacttactgttaaaagcaaaaatggccatgcaggttgacaccgttggtaatttataatagcttttgttcgatcccaactttccattttgttcagataaaaaaaaccatgaaattactgtgtttgaaatattttcttatggtttgtaatatttctgtaaatttattgtgatattttaaggttttcccccctttattttccgtagttgtattttaaaagattcggctctgtattatttgaatcagtctgccgagaatccatgtatatatttgaactaatatcatccttataacaggtacattttcaacttaagtttttactccattatgcacagtttgagataaataaatttttgaaatatggacactgaaattattcttgagtctttcatttatttggataacactgtgattatacataacttttcggggaattataatactgtgctcagccaagaaagcaaaataccaaaaaccttggtattactagtccagcatcatgtgctaatgttaactgcaaaaaagaaacggctggatgattaataagtactggaaaaattgaaatttctgtcatttctaaaatagaaactagagacatatattgtaaatccgccccctccttttctaagcagcatgaataagcatgatggggacctatacttaaaactgatttatgccacttgttgccagaaaggattcaattctgaaatttttcatgtagtttagcagatgggatattgagccaaatcagaaccaggttggctggttttgttttcattttcttcacagcacaatggccctttgaaacctggctatagagaaaaatgatgcttcttgtatcagaataattgcaaactagacatgcaaagtgttcatctgctgggtgggtgtttggattactctggccctgctattgtctgagaggaaacaagtggtttgctttctttgttccttgacttcataaactttctcctctacattttcctgttcggggagagggaaagaaaagaacatcttgcaaaactccccggcttatcataaacatagttttttttattatttattttcttttttcccctctctctccctctctccctgaattccatttcttaaattggcagcgcgggtccaagcctgtagccccaaatcggataatctctgcagctgataacaagcaaaagagaagccaggcaacagccatattaaagaagaaaacaatcaactctgaggtagatattttactttgtccggtctaatcacatttggagatgattatgcttttgatctgttaacaatgttttactactgtagtagagaagtgggggaggggaaaggggtggggaaacaagattggatttgttgtgtggtggttttttttttttttttttttttttttttttttttttttttttttttttttgccctaggaaaggtaaagaaaggctatagttgtcctcagtgggagtggaaaagttgagacatcgccatggtctttgaattagcgatgcttctgcatcaccacccacccttgctttggggcagccggataatctgttacctagtcagggacttttctactttatttactacttgattcgctcgtcttcccccacccacggggaccaggaaccaacaatcgggcacttttaagagcacgggtttgcttcccacaatttcaagagcttgtgtcaacttgctacaactttggagaagttggaatccggcagcgtcttccacccttgagtaaagtacccgctgcagccactaagttagctcatcccgttggtttgcatcttctcatttccaagaaagtatttctttctcatggtgttgctaatgttagttctgggctgaactgaggatatctcatattttctgtactttctatttttttctagattgctttgttttagatatgtactggtttttatttattacttttttaatcctcatttttaggataacattgtactgggaagggacaattattattccagttcccaattctaagcaaggcattttcccccctaattaatgcagagactctaaaagaatttcccctagcctggccagccattgtaatgcatatacggattattcacgtggtaatgagcacattcgccagttcttgctcacacatacgaataaaagaaactttgaataaagatccaaatgatcatcctgggggagtggggaggatattcccggaatttgaggcagtcaaatatatagattatatatattttgaaaatagaaatatattagaaatatgtatagaggtttacagtaattgcactgcactcacctctcattttttaaaaaaaagcccacagggtcagcaactttctggcaaaatggtcaggttcaaatatttagcaaaaggaaagggagcacaatattttgggaagtagaactagctttgaataattgtcactatctgcataaaacaagagaactcccgttcccccttctaccccttcatatcgccgagccaaatagttgaaaaatgaaagtcaaaatattttgtttgcaaatataaatgcttttgataactacatctgagggaaatgatatatatcttgtacgatcattcatttgattaaattaaatggttacctgagatatgtaatttcatggctagattaatatcgaacatataatattttaataataatgtgattttcaaggagagtaaacccataaacttgcccagagatggttatctcatggtgctgaagatagttgttgtttagttcttttcctcgggatattattctgctcaatgaaaccactcaatttccagtcaaatagggtgaatttaaatgttttgttaactatatacacagaatagaaatgtgcaaaaggatgagagtacagtctgttctttctgaaatttttttctctccccaaaccacccaccccccccccaccacatactttaaataaagagcgttaaaatattttgctgagctgtagtagattagcaaggtttcttgccaatgctgggaagctggtattacagaccatcccaggggaaaatggctcacattaaccactaaatgaatatttgacaagggctcattcggaggtattattgctataaacgtgtccctactggacttttcaagggtcaaagagcaatgcttcaattaattatttagactgctagtagatttggtggtaatagctgtacttatttctagaaatcgacacattcttacagtaggaaaatctcaggagaatcttctccatcagcaataccttggattgaaatacacacggagccctggcattctaaagctgactttttcataaaacctttccctgggctggtggggggtggggggcacagaattatagtctctttttctgtttcactggctgtttttttcggtttaaaagaaaaaaaacagaatacagtaatttatcttaatatcctcatcatgtgtggcaaggtcttttagggatttgcaatatggggcaaaaggggagggtgctcatttacaacctttgccttttctaagtagagatgtcacaggatttcagagactcagagaggccctgaatttagacaggatacacattcctgtttgccaataaaatgcaagtttgaaagtggaaggttccataagctgagtacccttagttctagtagtctcgagtaaattggggtacaaggtagttcctccttctctccccacctattggtctgaacactgcaaggtgcagtaggggggccagtgttccatttctgccatgtcataggttcctctgtggccctaggtaaaatggtaagggaatgattttgagggtaagattcctcgacaataatataaattgaatgaataagagataagctgcaatggtggggggggtggcggtgggaacagtaattacaaacccaattcattcagcttttcagaacttttgttgtgggagctccattgacgggttttgagctgccagttttctcacattaaaaagaactgatcagcgcctcagggggacaagaaataccgcttaactgcatagtgatggggtcttcatttagaaccattacaagatgaaaattaaacagtgcctttgtgtgcatgaggtttacttttcaactgctaacagtttatagctaactgctctgagattgaagtttgactatggtttgatcgcctgctgattgacgctgctcatttatttatttatttatttatctgttataattaagagaacttttcatcacctcaccccagtttcatttattgatcttggagaattttgaaaaacagatcctcatatttttctttgtggaaggagtttcctttgccatgagctttagcagagacttcagttcacattccccaacggacaacccccaccccacacacccacattattcccttaaaataatttgcatctcattctctgttttttttttctgctgcattttcttgctctccaagctagagttgcttttcgggcagcaagtagggttggagataggggttaatttatttttttgctttgctttctttttgtgacctaaattggaagagggctggatggatttcctaaggacttcacctatgaggtgaatccctcaaagaaggaagaagggggagaaactctgacctttactgtgaaaatatggatacagtccaaaaggacatagtttccggagttctagagtaagaaaagctgtggaaggagcttcccaaagacaggaaagttgcccaaaccagataattagtttagtgtctttcatagttattttctattaaaacttttctggaaacccgacatctgttaccaccaagagacacttgtaacctcctctctccctgctaacagtgctgtccagttttatgattcttgttttcagtttgtctattttgcttctgtggcctttagaaaataatggacttgactttcttattttgactaaggggatttctctttggaagggtggagtattaagataagtctaagattcttgtctgtggcagaaagctctctttctctattcggagttcagatggattttattttatactttggtataatggtgatatttctgattccttgagcactttgctcagtttctctcctaaagcaaatagaatgtcttctcatttcgggatgcaaagatatttgcttcacctaggcgtttgaacttgagatgcttgttctactctgcaaagaagtgtcaggtgatttgaaagctggaggtgtccttcgttttattaccctagtctgcctgcgtgtacagaatgaagggtgcactgttttatatagagttcggcgctttgaactatcatttgcctagctctcccagcttccgcgcgggccacggctccgggctgtgagcgcgccggcctcccgccggctgccctggggagcgcgcagtgcccagtgctgagagccgacgcgcgggcaaattgaggccgagctgacgagctccggcgggtggacctgacgtcaccgcggcccgggtcacctcacccatggggctccccaagaaggtgctgtgtggggctcgagttctctctgcccgggctctgctcaaacggtcgcattccctctccctcaggcaccgacccgcgtcagacaagtctagaaagtctcccgaggcgttggggccctcaccactccagagtcctctgcctcctgcgccccagcccaagccctctccatgttgacctcgtgacacgggagacggtgtctaggccccagattcccacccacatcagagattgtctacccaaggggatgtttgtccctgtttgtggccaaatctcagtattagtgatctcgctcggttcttcccgattagaggccgaggattggcagggctgggggaagcccccggagcaatctgggatccctggaatattgggcccctctggattagagcaggtagggatgggaagatacagacccttcactttcccacttgtgagatagggataatatatagttacctcgaagaagatgaatacagagtgcctgacaaaacaggcttaattgataagcatgactttacttactgcccagcagaattagggaagggaagcagttctcacgttagactacagagaacaatacagaaaccccggtcctttctggccttcctggctctggacagtgaaattagtcttgttcataccacccttcttacttttccagtgctctctctgacttaagatttgcctaggaagttatcttgcaaacttgccatccctgggcatcgtcctgaagggagggatcccggcattccgggcaggacccgcccccacccgcagaaggcagaaaaataattactgtattaaataaggagcggtgaattcttcccaagggttcttatcgctggcggccaggccagaagcgggactgcgcccccacccccacctcgtgacgtcagggcctgcagggctccggggatgaaatgattcgtttgagtgttccagaaagggcaatccgaacgcttacagggcgaggccagtgcagcccagctccatcaccactaccaagccccagtttgggaggctcccgaggcccctggccgccccccagaccccgtctccagaacataaccacatatacaagtaaccataatcctaagtacgtatatagtcacgcgcacaactctcgtcacaggaccgcccttcttccaaatatatatatgttatttagtttgttagccacaatttgttgtgggatctgaatgagttgtttctgttgtgtttgtatgtttttgtttttagacggtcgacaaattacgacaaatgcctttacaaagcacaccatagctttatttaacccggtgcaagtttcagcggcgatttaagaaatggacttagaagagttttctggctctcatatccagccatggttaggacaattgctccaggcttaccattgctgcactagttctattttctctttcccctctattcctaagaatttgtatagcttttaaaaatctttttagagtcatgtattgctgagagaatttcttagaactgtgatttaaattgtagataagaggaaagattatctggtcagtggaatgtgtgtaagtggcatagaagtatttgttagggaaaagcacctgggcatttctggatttctgggagatgcacttctcaagttttctttccaactctcaaatcaatttgatttattgaatgcccttccaatggaaaggatcctggaaagcaggccttatgttctgatattggtccaggatctcacagagtaacgattagccaatattttgcatgcagtcagtttagtatcagctcacatccaggtcgattttatcacacttaacagctcaaatcggggttattgcataatattagagtttaatcagtctggaatactaaatggcaaacctgtcttctccttctcaaggccctcctccctttctctatttctccttcctcccacctccaaggaaactatcttaaaatcaagtttccctttgagagtttgtttaccccaacttctgttaaactagactaacacgctctcatcagctttctaaacactgtctcatcagctttgtgaaatggtgcaaaaacatcttggaatccaagatggcaaaataaacttgagcatatggggggaagactgccttgttaagaaattgatttaaatgtttagcttacacttcagcatcaatgcttcccttactacccactcttacttccctcactgcccactcctggttcttgggtaccccacctctattagcaagctggttcccccagcataaattatgaatgcatatcaacaggctcatctgctgtgataaatcagaggcttttctcttttgcacatttctgcttttattctcatcgaaatgtctttctgccccatgctagcagtgtctttctacaaacttactatccccgtataaactatggagatatattctcaattggaaaaatcaggtaatttcaaccgttccccccacccccaggaagccttacaagttaaggatacaaaatatttcatggttagttgtatgagcttccaaattagctgcatataaagtatttaagatttttttttttttttttggctgtcactggctggcaatactcattttgtgtgtgtgtgtgtgttggtttgaaaagcaggaagaaatgtaatgaattgagtgctgtcagagatgtcttctgtttgaacaatctgcgatgggctgaatggcagggactccctcatccagtgcaggtgcagtagagctggggaaggggggaggggggctccctctgttcagtcaaaaagcaccattctccacaatagaccacacactgacagccagcgtgacatcaactcacactttcatacttttccccccatccatagttctgagttcacaaagtggccatacagtagccttggttaggttcctttaatgaacattttgcggctcctatgaccaacattgaaatccgcagagccctgggaggaacaaatagatttttaatcgtgagttccaaaccagaatgtatagctatagatattaaaagtaagctggtctccacatcctctcccaatgccaatgcccacagcaaccccagatgatgtgaaaactctgagttaaaagttcttctaagacttattaggttccaagacactgttttccatgtcctgagagagatcaaacaggaaaggagagaaggcacaaattttatgtatttatttaaaggtaagagcacctctagtattttattatgcttcatgagatggttaatcctacaaattaacaaacattaatcttgtggagtggagttctgcccccttttgaattggttttactgggaagaggggtgtggaggaaaacaagagggttaggaaaggcagcaactgttttaaaactctgaacaaagatgcgaccaccttttggctgtcctgctgctgcaaggactggaccttccaagagttcgttttacatttgttgaagcccaggccttggtgcctcaagttttaaatggaattactcaaggggggcacactactagacaaactattctagccaattccttcatccccgacccagtccctactcctctctgcccccgcccacttcgccacttcttagtcccggatctgaacattttagctgaaagagggaggggtgaggaaagggccaggacagttccctcagtgccaccactgcgggcaaggacagttccctcagtgccaccactgcgcctggagagatccccgcggccctgccgctggctgattctcccctgtgccttgacttgctgaaacatctctctggggaaaattactccctacttgcttacatgtgtgtattaaaaaacacatgtagccatacacatgtttcatcacggcaacaaaaaatatcaacattctagccccaggagcaaaacgtatcaatcattcgcctaaatattgttcagtagatgggggcgggaataggtagacctcctaggagagcggtcacaagtcccctctcctccgcatggacaccaggaatgcggggtctggcggtgctgggcgcagggcgagaagatttgatgtgcagggtaagtaaaggacaagttatttaaaacctcaacacaggaaaagatggtaagagtgctgtgtagccctttgcttgcttgtgactacgagtcgctaggtggcccgcgtttagagtatgcctacggcgcctactaacgtctagacctaggagaggcgtctcccgcccctcgacccacagccagccgccacttgatagctaacgcgtcttccggccggtacacacccacaattaatctttcttattaaagcctccattctgtacccatggggcgactcaaacctatttagatttccgtggttggctgcacaaatttaagtgggcaacgagttataaacctaataacagaggacgagagagggtgatttgagtagagaagacgcaagattcactagggtcgtgaagatgctgcgggccttgcccaccacggcatctacctcggggtgcacgccaggctctgagaaaggtagtgaacctcacaatcacactcaccacacacaacatgcgtacacacacttgcactcctaccccctttgctcacaggtacacttgtgtggaaattgcctcttccgtagttcttataaactcctcccagacaggcagaattctcagagcatcggaaccagggaacttgcagggaaccagggaaggtttgcactgtttgggattaattgagaataattaacactggagccgttaatcaccactttgctgctctctccctcctttcgggtctgcggcgtctgcctttttcgctcccgctgccggcgcgggtgtactggtgaaagtgaagacgtcgcggtagctgtcacccagttcggctgtacttttttaaacgctcgcatattgtttgattactaattcgagttaatatgatctttatggcaacataacagtggataattggcctttttttctgaacaacaatgtaaatcacaatcgctttattatttaataacgtcaaacgcttcgttggattggccccgaccgagaagaccttttctttctagacagtgttgtggaggaagaacaatgaagatctaattgtggagatttcataagttggctcccgtaaatgaacagcttagatatggaagttccagcagatgtgggtactattcgcctctacaagctctaccccccacccccatatacgcagtccaaacactctattggagggttttttttttttttttttttttgtggtggtggtggtcctcagatcctagcaaccacctaaagtttccagtagtaattagagcttttatcgggcttgctcttcagccctttatattgccgatttagcgttaaggcattaagtccacacaccaaattagcgcgactcccaaatagccacaaccacttattctccccttccctcattttggtggttggacaccaagagcatgggcctgggacttttttttttttttttttttttggttttactttgttttgatttgatttttaaaacctattcgctaccgcactgtcttggaatatacttgtttcaggcagagttttgcaagggacctgagccattattttgcaaacgcctggaagagcacatgaaactcagagaactacaatgcagacgacaacgcctagaaggaatgggtccccgctgctcgaatgaaagattaattacatttgccccaaaagccccaattctaacggtctctatcgcggcttttgccgtcactgaaggaccgctgtctctggggtcttcagacatcggagtcctttgcaaatgaagagcccccaccatttggaattcgggtcaaggagaaagactctgagcctgcagcagtttttgtttttgcgtgtgcccgcctctccattttattcaacttcttctgcctgtcgggaagcagaacaatcgctccccacccacccccctccgccccgtttctaagataaacaggaggtgcaaaatgctttgcctgcacacgcgccctcgtggcccagtcttcctgcaacccccagcgcaccggccatgcatctgtctcccaaccagacgtgggagaagacatccccccttcactcttcccacctgcatttaaaaaccatcacattgactgctctagagtcaggttcacatttttggccctccatgccaccttccagtttcttcccggtccactctctttctcaggacctaaaaagtgacggggagagggtgaagaattggagaaagcagcggattttcaaaacgtatcccccccgcccccccatcttttaaagtagtatgttaccacaaggagtgcatttgggaaactttccctaacaggagctgggcgcagtgttattcttctccatgggtctgctggcctccccgcccccgctggacaatgcgtgctttgagactcggtggcctgcaggcagcgggagacgaggggactgggcagccttcctccaaggggcccgcagctgggggagcgccaggcagggagcagggacaaggaggcgagccacgcaggaaggaaaaccataaaagtgccattttttcccttagccctgcacagaggcaggctttgaggacctaggggcagggcagctggggcggggtggggtgggggtgttgagaggttttgcgtgttctttttaccccctttccccccactgaaacattttatttcggcacataattatgcactgcagattctccagcctcctcgccctcaatcttggtaacctggtctttggttaataatatcgcaactcgggacttcaacgctcagaccccctccaggccccagcctccgtattctcggagccctccactactgatacctctcgcggagtgcggcgccccgggaaaagcctcttggccagggactctgggacattactttctagtttgttttgttttttgtttttctcccagagaccaccaccaccctcatcctcttcaggcagcatttaggagaggacctctgagatcagcagaaggcctcagacggtcaccatattggtggaagcgtttgtctgatgttttaaaacgtataccaaacggggcgtcagggccacgtgctgtgccttcgaaacgccgccgcgggccctgcctttcagagctgcggcagccggggctggcgtggagggggcgctgaaacaccggcgggcgtcaggggccagcgctgagctgcagatctggccgcagcgctgagtgaagcgaattatctggagcgtgtttgatctgggactgcgtagtcagcttctgctttatttgtttgtttgtaatctcatatttagcaagccgggacggtggcagcaagggagaaaggacgggatggaggagggggcttcgcggtaaccacaccccttcctaatgagttaatttccatatttgcgcctcccgcatctagcgccctctttttttttttttttttttttttttttttgcctgacgccactgtgctgttgcgtcttgcgcagcgcagacacctccactctggattgaaacgaaaaagctcgcggtaagagcagaaaattggtctattgatacattcgctccgagtgttgatcttggcatcaccgatagccggttaattcccccaccccgcccccgccagtgggtcgcacgcggattgccgagggcttgcaggcactcaggcagacgcagacagaaacccacatcgaccccccccctttccccgcctccagctgtccgaccctcaagtctctttctttttcttttttacccaactccggattattttccccctcaaggtgagggcagtgagagcagcgagggcacagtccgcacaaaaagggggaaaataatcgcaaaccaaggaaccaaaagtgaaagtttcaaactagataccaaccctgatggaggttgggtgctgacccgactgtgggtacttaagagaaggaaggagggaaactgaggtggtgagattatgtccacagtatgggtcggttaaaagttgtagtaaagaagttttgggagggccctcactagaaactcaaggcgggtttcagctgatttaacctggtttcctacacatttttgcggtgattctgctctggaaattggcgaaagagacagacctttgcaattgctcacccctccctgcccccaaccaccctgcttactttcgcgaagcgcattaggatgtgggctctggcttgagctccaaaatagcttgcttgtcaattgcgagctgcagcaatatcaaagtgaactgtcccaagtaactcttgtctagaagctgggaagaagcttaagcagctcgctttaatgatgatttgtagctcggcgaggggcacggacagcaaacaccccgcaggtgtgtgccgtaacaccatcatccggacttgaatgtagattactctggcgatcgtttgatcggccctttgaaaccctttacaattgcctgtgacgaacggccagtctcagtttttctctgaataatccctgagggtaagtcctccgggcttttaaagagctctagtattttttttttaaagaataaaaagaaaaacgttcgattttagtttagacctcgtcaacttttagtcgctaacaggcatcactcaagccagtcaatacttaatgaccgttagttacccttgctgtcttcctagaaaccatatacatatgtgtgtatatatgtatgtgtgtgtgtatgtacctacatacatactttgtgtttataaaaaggagaacaatgttattaatttcattttctttagtttcatacctccttgcctgtttatagaggtgtgtgggggtgtttattgtaaacatgcattattattattaatgccattgttaatcttgtcttaatgccttctctgttctctctgaattatacctactcagtgggagttaacgtaaaggttaaagctttacaaagtaaaactagagtttaacccccctcagcaccttcacaccaaccgctgtcaccaaaatgaaaatgtagtgctgttcaacctttaatatttacttagagtatttacataaggggagggaaatgaacttttgtctgaaacatacaacaagcggcactttgattttataaaataaatgtcaacaattgctagggcttatcaaactggggtagggagtggggtggaagtgcagttggattaaaggcccattcctgccacttcagactacaaagggttacacataataagtgccgaatttgcctattgcaaaagttttcttggtgctttctaagtcacaacaggggagggggaaagctgtcgtttattatccagttctgggcaggagcagaccccagtaccaaggggctcttagctttgcccggcagaagaggggtagcctttcaacagcagccccctttgttctcctgatctctttcccaatttcaagcttcacttgcacatcccaagtttgtgtgttaatgacgctattaccatctggctcgccctactttccaaaagatataaatctcccagctccattgcccgcattatcatttaagtgccaccatagccagaagaaaaagatgctttcaagactccagattctcttgcacttactacccctggcatggctcttccactatatttatagactatacgttgggggtgggagtgctccttgagagacctgatttcccaagagctgtccctccaagccaaagaaaacatgcttttgggtgaaaagaaaggcatcaaatgaattttccctgaaaacatttttgttttgtttgcagcaagccgaatagtatgtgccaacatacttttacgtgcttgtggcttcctttctctcgcaggtttgtaaaagttttggtgcaactccccgacattcaagatgtgccactcttcaaccctattttgagcgggagaatagatttgtttctctataggagtgggggcaggggtgaagggagataaaaagagccctgtgaagcaacttttgggagctgggcatcccttctaaaccctcacttttattagtgcctgcatagatgtgtaggtgttgtatgatttacacacttctggttgtagatctagatccacctctctccttcgattctttcctgggcaaagtaatcagtgatttgcgtgttttgagcacaaaagctgagaaaatacgacaaaaggagtggggctggcttgtgcatggctccacaatgactccatttaactggccaggtccgagtgaatagaggagagcagagtctgcctctaaacgcgtgggcttttggttcaggcccctcgctgatttgaacagctaatttcccctttgcgggtttctgaactgtttgtgctcttggtccgtcatatgtgggtgcatctttctccgtgtgatgcctgctcttcttcccactgttatcttcacagaggcaagttccactaagataagccaacccaacaggttggaagaagaattggaaatatgaacctcccaggatcttaagggaagctcttaaaatcaacaggatttgagcagcaatacccctgcccccttaaaaaaaaatgtcaaacagagaaagcatctttaaggaaaaatatattctttttgaggaataacaaaatcacttattatatattcctaatactttgtatgaactgagcacagaaggtgtccacaacagtgattaatttatatcacactcatgtagctgtctgcatgcaaaagccacatttttctttctagttcactttcctgcttttttcccccaaactcaaacaagatcttgtttagaaatgtgtatccctactttttcctcttgagaacattatcaagttgatatgaacaaattgcagaggatataccatttaagtaagatgcacttttaatcactgatcattaaaatggttatgttaaatatactcaattacatgcatgacttaactctaacagtactttctattctcccagctgctcacgtattccttaacgatagtctgtggtagaaacttgattatgctgaatccatacatttcgatggatttcatcagcctaattaatgcctcagtgtggtcctggggtctgaatgaaccctttactatcgtttgaggttaaaggcagtggtggaatgtagaaggatttttttttccttagttactcccggggtacttagggattccattaagcaaggtggatagcagttgttaaacagactatgtggaacaagaaaacccatccaaatggcagaaaagtgaggctaattcttcattcttatttcacaccaacactttcggattccatagacaatctccaaatatttagtaaagtggaaattaccatcttccgttgtatcttaaaacttcactgagaaggaagagttgaaaatagatttacaactgatggctaaattcattttgttttattcatcaaggctgtccctgctccttctcttcctgttcccataactttcagactacttgccccctcaatttcaactttcatctttcacaaggaagcactcatggctgttattcagcagaaactcaagtcacccccaatggggtgactacattttgtcttttcaggtgtaaattaacatctgaatacatctcaatcttactgacccctaccaccaccaccaatcctgcctcagcagagttgcggctaatctgtacctccacaaatggcagggtagatagaagtcaaatttcccaaactccatcccccagcaggaagaccaaaagtgcttgtattgcctatgagataaatcctgatatttgcacatgtctaatgaaacacctgtggaagaatacctttcaagacatgtttccttggtggtcaagaagaaataaaaagaggaagaaaaaaaaagagatgaaggtatcttgattctttaagaaatgttccaactctgactttgagtccctaaggacaaactgttcacccagcagaacttccttcatgcaagagatccactgacccagcccttagttgcagaagggcaataccatacgtccatagaaatctgatggaactggaaggattttagacctataaccaaattactaccttggaactttgtgcttgttatgctaatgtaatgatttctgtagtaagggtatattgtaaggttgcaaattacgtttttataatgctttgtgtaatgacagacgttacatagaagagacacatgtgccaggattggtggcatagtactttttttttttttttttttttgagatggagttttgctcttgttgcccaggctggagtgcaatggtgcggtctcggctcactgcaacctccgcctcccgagttcaagcgattctcctgcctcatcctcccaagtagctgggattacaggcacctgccaccatacctggctaatttttttgtatttttagtagagacggggtttcaccatgttggctaggctggtcttggactcctgacctcaggtgattctccagcctcggcctcccaaaatgctgggattacaggcatgagccaccgcacctggccagtggcacagtactgacaaacactggaggacatttaaatagataaatgtagacctagatatgtttctaaaattaagctgagaatgagctcacggaactaggtaacaaagcagatgctgctggccagaccattgcaagggttaagatggtcttgcagcacccaccttttcactcagatctagtggagtagcagcacagcacattgctcaatcctttgggatagattcctagggaagaaaaaaagagactgtttcataaatagtactgcaagcaagcagttatctccagctcatggtttctgtagtgttaaggttagattgcagagggtcagagaaagcaatatttcctgttgggggtagaggagagagaaagtgagtgcaagtatgaagtatgtaaagaaataaacctttttttttttttttttttgaggcggagtctcgctctgttgcctaggctggagtgcagtggcacaatcttggctcaccacaacctccacctcccaagttcaagggattctcctgcctcaggctcctgagtagctgagatgacaagctcccaccaccatgctcagctaatttgtttgtattttgtatttttatttttattattattattattttttgagacagagtctcgttctgccggccaggctagagtacagtggcatgatctcggctcactgcaacctccgtttcccgggcttacgcaattctcctgcctcagcctcccgagtagctgggattacaggcatgtgccaccacgcccagctaatttttgtatttttagtagagacggggtttcaccatgttggccaggctggtctcgaactcctgacctcaggtaatccacccgcctcggcctcccaaagtgctgggattacaggcgtgagccactgcacctggcctaattttttttgtatttttagtagaaacgggttttcactatgttggctaggctggtctcgaactcctgacctcgtgatctgcccacctcggcctcccaaagtgctgggattacaggtgtgagccaccacgcctggcctgaccctaaaatattagagccatatatgctggggttgtcagtacatcccttacattcagtgcttcatgtctctgtgctatgtgattaagaatgcaggcaaatcatcaaacttgcagtattgaccttatgtgatttgtatcttggaaatcaaggacaagatagcttaatacagcacatttacaaaaattaaatacaactcttcagtgtttaagactgggctggggtttaatcatttcccttaattgtaaacaaggcaaattcacacactgatcaagcatccaagaaatgaacgtgttttcatcagtcacctctccttgatagataatcagaggtcagccactcccagcccggatattatgtgcctagttcttaccttctctgttccacctccacaattgacagctgcctcagaaataaataacttggttcctggataggtttggggctctttggcgtgacataatttccaaatgtcaacttacagctatggagaagcctgcggactacgataatggataaactctcctgtgttaacaggagagtttggagctagaataaggttgccaaaaaatagcctcagtgggttgggagcttctaagatcttgagaaatgaagccaatttgaaatgttggctttttatattagtccaagttgtcccattttcttctagagttgaataaaagcaaaatacctggcctgatgcagtgcttccctgatgacagttgaactaattagaggtggtgtttcttggttcagcccaaagatcctactgatggtagacgtaggagatgcagcctccaacagctttagttttagacaagttttacacagcccaagcgcggtggctcacgcctgtaatcccagcactttgggaggccaaggcgggtggatcacgaggtcaggagttcaaggtcagcctggccaatgtggtgaaaccccgtctctactaaaaaataaaaaacttagccgggcgtgttggtgggcgcctgtaatcccagctactcaggaggctgaggcagaagaatcacttgaaaccagaaggcggaggttgcagtgagccgagatcgtgccactgcactgtagcctgggtgaaaaagcaaaactccgcctcaaaaagaaaaacaaaaaaaaaagttttacacatccatgctttgaagttataaactgaatctgtgtcacttaggttgctatcatctgattcccctctagtgcatttctttgtatagatgagcccatgcaggcaaagtgtaactaactgtaatatttaatacataaactctctgacagagcaaattgataaatcagaatatttttacatttggtgtgtacatgattcatagtatgacaaggtcataagcatttttagcaaggttcttctgaactaaattaagatatttactacataatctaatctaccaagtggggtagattttagggtagggccacccagtgacaccttaaaaaatgccctcggtgaaatgactcattagtttaagagtagctgagtagtgtattatagataaaaatggagaggatacagatatggatacatcttcctcatgctctcttgtgatatggcaacatatgtgtgtggcagattgtagagacaatgctgagagttcagcaagaaacagtggcattgaggcagagaaatggcttgctgtcattttatgggttcacgttatttattatcagatgccattcagtttcttctgagctgaaggatttatctactgcagaaaccctgctcatgttgatgggaatgatctaaagcttcaaaggacaggttttaagattgttgggcattagtttcagatttggactcaaatccaagcctgaatttcttattggtttggggaagaaaacacttaatttgaaattctgatacgaactgtatggcagcaaacttagttgagcttagaaacagctttgaatctcagataccaatacactggctcttgtattacttatttatggaagaaaaaaaggcaacacctggtctctaaccaggagaaaagcctatttgaagtatttcagtcattctcagcaggtcagtcctcagcagttcttagagaccacaatatttaaagccgtctgggtagttctggtctcatgtcatccaaacaacacattttcaaactcagaaatgccaggtcgtgttatttctgtggcagagggttgcttaggatctgtgacagctgagattttcctatcgattatgtgacaatgtagttcatctatagagttcagagaaattagaaaagcctccagtttaacaagaagacccttaattcaattgctgtgttgtatttaaatgcagaaatcaaaattcaacttacagaaaatggaatagtgaattaaattttgaacccaaacttctgtagctaaatcaacctcctaggagggctgtgactaataatttaatttgaagcattacgattgggtaactggatttgtaaactaggcaagaaatcatatcttatataataaatgcatatttagatccatatatgtgtttaaaattgctcctaaatttaaagcacggagtgagtctaaaacaggaaagataaatcaaaaagcactcttgtgactgtgtgtgtgctggagaacagacagaggcgggtaattatagaagcactaacctgcaaacaccttgaaagatgtctttcagatgtgtcttaagttcttaaatgataaaatatgcatgcatttttcaaatgcattcacaggtaaaaatattattttttatatcatcaattctttatctgtcacagaatatgtacaggtatacagaagtaactagatgtccaatacattctaggggcccaggatttcaatcaaaagtaaacctgggtaatgtgactgtaaatcaagggtgcttgagaccatagacacacacacgcagaagggttaactggaggagagggaagagagacgctcctctgtgcagtttacgtgagtgacaggaagaaggggagcaagagctagagcaggcaagcaggcgccctgcagtcctcacactgaacacattcccttgttgtggagggacacagtgggaaaactgcagcctaggctgtggcctgcaccttgcccacccagccagcagctcttctcgcatctgcttatttcttgcctgaaagtcattcagcatgttgaaggtgcgattatcgacaatttgtcagtctgaatttgttgctggcaataacttctttgtgaagtttcactctcaggcacttgagttttgggattagaaaactggtgatgggagagcattatcctgtggtctgcttttcatttagacacagcccaggcagacagaaggaaacggagcattaatccaactgcagtcaccccaaagtacaggccatttggatccagaagagaaactggttccttctacaagctctcccgttctccctggggcccttcacagcctccttgtctacgttgtggctgtgctttccctggtgagcaattatgtataagaagtaggggatcctctgtattctgcccaaccaccccctcatccttcacaaaagttaatgtcttgggcctacaattcacttgggcagcctggaactgagactctgaagttgtaagtcttttgttttgttttgttttgtttacttttagttttctgtttgtggatgtgggtcctgaatcggcgccctcaaagttgaaacctttacctttttgtccaacctcttcccttcctctcatcgggggtgggggaagatggtggccaaaaagcaggccgtcccttggatagggcagctgggacagctgctccggagcagctgctgtacctcacccttatttcctgacaatcattaaaattcaatttcaaagtttctgtctttaacaatttcctaaggggcctatgaaggatgccaaaagggtgggcctcctttccagtggcagtgctttggcagcaagtagacactggtcaggttgcctgaggctgtgcccttctcacaatagtcctgtggagagtgtctagaatggaacactgcaggaacagctctgggaaagttttaaggtgggccaagaagtggacaagaccagcacctcttcccttaatcagcattgctcctgaagtacagccttcctggtcctagggtggagctcaagtacaaacctaggggaaatttctcatactttaatctcataattcctcattttcttttttgctcagctcaccaacttctcaaaccttgattctaaaaagaaaaataggccaggcgcagtggctcacacctgtaatcccagcactttgggaggctgaggtgggtggatcacttgaggtcaggagttcaagaccagcctggccaacatggtgaaaccccatctctactaaaaatacaaaaattagccgggtgtggtggtgcatgcctgtagtctgagctactcaggaggttgaggcaggagactcgcttgaacttgggaggcggagttgcagtgagcggagatcgtgccactgcactccagcctgagctacagagtgagactcggtctaaacaaaaagaaaaataaaaaaagatttgtatatctgaaatttcccttctatcaagaagctttccttaacacctcttttccctttggttggggaagtcttctattgggccaaggcaagacaactaagatattttgagaaacggaaaaatacatgtaaatgtacagcctaggtagctgagcctcatccacacattttgagtgaaggttgcccatcaaatgctattcagactcaccctcagaggagtttctcattccctgctcccaaaatttaacatgtgattagtaccaaaacatgccacccttaactaataccctcttgaatctatggaaaggaaacagcatttctttgaaattctagatgggagttaaggactacctgactactcttgccttcacctcgtaatcacatataactatctcaaacacccccctccttccctagagagccactgattggcccctcagcatacctagtacttttccttctcttctcaaattctcatcccttacccttttctcctttggaggcccctggaaaattttcagaattaaattatgattttttttgaaatgccatgacaagttagaaagggaaatttgagacagcactagaaatacactaacagagagtactattacaaggccgggtgcggtggctcatgcctgtaatcccagcactttgggaggccgaggcaggtggatcacccgaggacaagagtttaagaccagcctggccaacatggagaaacctcgtctctactacaaatacaaaaattagttgggcatggtggcacgcacctgtaatcctagctacttgggaggctgagggaggagaatcgcttgaacccaggaagcagaggctgcagtgagccaagatcatgccactacactccagcctaggcaacagagctacactctgactaaaaaaaaaaaaaaaaaaaaagtaccattacaactgaatgcagtagacaagtcacagtttggggtatcagcaattaattgcacatttttatacagtctttttttttaacttcatttttaagatccgttgatcctaacagatgcaagttaaacctgaagtaaattagagcaaagttaaagaaaaactagatcaagcccttcctggactggcagccctcctatctcgcgtagctcatggttatttggatagactctttcataatactggtagcagagacagaccaacaccaaagccccacttcttgttacttaatcacaaacctggcagaatggcgactccatacctacaaaaactagtcagtgcttattaaccacaacagatcaataaaaacaattatctggagaaataatattaacaacacgcccttgttaccataagacataagttcctgagaaatttggagcttccaatagcacatttctgcttatgtggtacctaaagttgtttcctggaagtgaaatttgaatcatttgcaatcattttatatccttgccccagaatgactctgtctctaaggctttgaatacgtttactactatgggcttttaatattctctaccctagtgaaaaggctacatattatagtagagaagatactgggttagaaatgccaaccagaatctaggttctagttcaggcgtctaactagtattttgtatgtaaggcagttcatgcttctggccttcagattttgcatatgtaaagtaaaaacatgagaatagataatctcttagatccttcattctgtacttttgtaacatttgtgaattttgaacctaagagaagatccagatccatacatttctgaataaaatacctatttatttcatagtccttttagtaaaaatttatgcaaaagactgaaaaaatgatttttggtcttctctgggagagattctgaactggactggaggaaaccaagctaagagacttggcattgttttcttttgtacaaatgaaccattgccttatactttaactttttttccttttcagatccaacttagaaataatgtttcattcaagataaggctcgtggcttaggagattgtgacctggcttgcatcattctaagacttctatcgtctgttttcaaaacccaaggaggacctccttttctgtgtgatagttcctcatgctttgccagccactgggtctttaaggaagcttgccaagagttcccggctgggaaggacagttcgagttcatcatagacaatgagctggcaccacagtttaagtgactcaccaacctggttgcccacttcaaaatgtcaagaaccacactatctaattgaaagaactgtgttttagcaaagtgtaattggatcgcctggcaagatcatctcaaactatgtctctgaccttgcctttcagtggctattttgagcacaagaggagaaaggaaatgattcctgaattatatcttgtttttaaaaattaagattaattaatacttggttttatgttcattccattgtaggaacttagtgattattacaaaacagtcaaaataggtcatagcaaaatgaacgtttaagattaggttaaaacattcctctgaaattttagtattcacttttgaagtgtcaattactatatttctgtaatttctcatttttttcttggcttagagtcaagatgaaaaatgatatttgaatcaaagacattgttttgttatatagccactcctttctaaaatgcaaatccaccctcccctcaccaatgctttattctttgtgcgcgcacacacacacacacacacacacacacacacacacacacacagacatacacagaaccagcacccaaatggtagaggaggtccttccaagacttctaggacctggatcatgtaagcagtagatgagaaaatgaagtaagagatatagagtaataacaataaaagtcaatgatttcattttacaaaaaagtcattgtgtagtactcagatatttttaagagcaagtattattatgactaaagtatattatacttctaaattattatgattctcatctaatttcaagccacacataggcgccatttgaaagcattttgtgttacaacctatcaacaaaaatcaactaatagttttataacgtgcataggtttaccccatggggaattaaaatttttatctgcaagtatttctgttgttgtgagactttaggacaagacaacatttggtgttaacatagaagaatattctatggcttttttagctttaaagttcattactctaaaataaagtacacgtggtatttttttcttcctagtgttctcttattatatgtagagtattttcggttgttgtttttaacgtatacattatttttattaagtcatttcataaaagataagatatatactaatagacccttggttttctcctaatttaattatttcaagtcaagcaaaattgggcaattttctttcaggaaaaaaaaaatattgagcatgattttgaggtaaaactgattatttacagcatcttttctctaataggctaacatttatgatggatcttatttcaaagttgattattctcaaagaaaagtggagatattagaatttccgagtaaattgcattgttttaaaaagtactttaatgcattgttcacattgttgccagctattgaccaaaaaagagaagaagaaaaaagaaataaaaaaagcagtatctgctccaaacgtcaagttttgcagtttgaaagacttgtacattataattgtttttttcttttttggaaagcagtagtaattaataccaaaggcatagacaatttagggccataacctcccttcccccctctccacctttttttttttttttttttttttttaactttaaccatgataggcatctctgcaaggtaggttttaacatatttttttcctaatttttttccctccattcagtaagaaggataagcttttagagtacccagtcaccgtggtaactgccaaaaaaattctcctgaagtttgaagaggtcagctagcagggtcaacaaccctggcctctctctgagctcggtctagcatgccccagcctgcggttggagtgtcaggccagatctgaccctgggaggtggaccattctggctctgatataaatttttcgagtcagttcatggcctggactctccaggtggcctccaaaatcgattttgaccccctgaccctgtctcacggaggcatagcatccaccctaagtaaggatttagccaggaatgacagctttccactgagtgttattggggacagtataaacagtttggaaagcaagtaaggaggtgtgagggctagcaatcattaaaagcacattaaaaaacaatttttaaaaatctttattagagaaagttgtaaatgcatatctgttacagaattcctgtgatttgtagagttttctagtcagttttgaatataaataggtcacatatctttatctttttgcatactttgttacaaatatgcaaataagataggcatacttgctacaaaataggtacagcaggaatgtaatatgttcagaaaaggcaaactggttattaaaacacattaacaggtaaggagtttctaatattttaaatactaaaattttacatgtgtattttgaagtttttaaaatggaaaaataaagaacctttaaaaaacccaacagtgtggaataaagataaacttgttgcactcaaggtacatttctactttgtaaagcaagaagccaatacactcagttggataaaaatgagagaaaaattgtaaatatagagagttacagcttatagagctgaagaggaataaaacaaaaaaaagtgtctctgaataactttatgtattttcaacagtttaagatatcagaaacttggaaaataaatatgatatatatataaatcatcagtgattatttccttttcattcccccccgcccccaggatgccaccgtgagtgtttgattttctctaggaaagtagaattctctttgagagttctagcctgtgaactcagtatgtaaatgtggccatcaagaagacagaactgccaagaggaaagattatgaatgtttttcttccttaaaaccattcacagtgtttcttcttccagtgctttactcagacttctccccttttcccagctctgttgaaaatggcttcaaaagcaacactgcagtggctaaaccaattgtactgtgaagttgttgagatgccatttcatctgaatccttcgtaaaaattagatttttaagtaggggtgaatatccttttgggagagggaatgggagggtagaagaaggggggaaaggacagagcagtttatatatatatatatatatatatatatatatatatatatatatatgagtatatatatatgagtatatatatatatgagtatatatatatgagtatatatatatgagtatatatatatgagtatatatatatgagtatatatatatatgagtatatatatatgagtatatatatatatgagtatatatatatgagtatatatatatatgagtatatatatatatactctttgtgtttgaaggcctctgtgtcttggcttctcactatgttaaatccctattataaaacttatcttcacaaagcctattatagtattctgagaacaaattggaccatgaataacttagttggaagtgtagattattttctactcaggggaagttagagatgacaacagcttaactgaaagaatagtgattaatcttaaatagatggatttcaaagtttcactcttgataaagagtacctttgatatttcccctcttcagaatcacgtttccactctctttgtattaagaattgtcctagtgattacactctccccctaatacagctcaaagtgtagatcattttttttccaggttgttaatttgtcagagaggtgaccagaaagacactctacttcctgttggttaaatcgatgattcctaagtggtactaggcttagatacaaaagtcaatgataagaatatcttgcataaatcatagcttcttacttagataaaattcttatttaaaaatttttaatttgcttaatgccctatagcttacaaagcactttttaaatcataattttgtttaatccttagaataatgttataagataaacaaaactcatc
